(19) United States
(12) Patent Application Publication
(10) Pub. No.: US 2022/0064635 A1
(43) Pub. Date: Mar. 3, 2022

(54) CRISPR COMPOSITIONS AND METHODS FOR PROMOTING GENE EDITING OF ADENOSINE DEAMINASE 2 (ADA2)

(71) Applicant: EmendoBio Inc., Wilmington, DE (US)

(72) Inventors: David Baram, Tel Aviv (IL); Asael Herman, Ness-Ziona (IL); Rafi Emmanuel, Ramla (IL); Michal Golan Mashiach, Ness-Ziona (IL); Joseph Georgeson, Rehovot (IL)

(73) Assignee: EmendoBio Inc., Wilmington, DE (US)

(21) Appl. No.: 17/420,934

(22) PCT Filed: Jan. 6, 2020
(86) PCT No.: PCT/US2020/012402

§ 371 Date: Jul. 6, 2021

Related U.S. Application Data
(60) Provisional application No. 62/789,275, filed on Jan. 7, 2019.

(51) Int. Cl. C12N 15/11; C12N 9/22; C12N 15/90; A61K 35/28

(52) U.S. Cl. CPC C12N 15/11; C12N 9/22; C12N 2310/20; A61K 35/28; C12N 15/907

(57) ABSTRACT

RNA molecules comprising a guide sequence portion having 17-25 nucleotides in the sequence of 20-22 contiguous nucleotides set forth in any one of SEQ ID NOs: 1-12655 and compositions, methods, and uses thereof.

[0001] This application claims the benefit of U.S. Provisional Application No. 62/789,275, filed Jan. 7, 2019 the contents of which is hereby incorporated by reference.

[0002] Throughout this application, various publications are referenced, including referenced in parenthesis. The disclosures of all publications mentioned in this application in their entireties are hereby incorporated by reference into this application in order to provide additional description of the art to which this invention pertains and of the features in the art which can be employed with this invention.

### REFERENCE TO SEQUENCE LISTING

[0003] This application incorporates-by-reference nucleotide sequences which are present in the file named “200106_90792-A-PCT_Sequence_Listing_DH.txt”, which is 2,303 kilobytes in size, and which was created on Jan. 6, 2020 in the IBM-PC machine format, having an operating system compatibility with MS-Windows, which is contained in the text file filed Jan. 6, 2020 as part of this application.

### BACKGROUND OF INVENTION

[0004] A genetic disorder is caused by one or more abnormalities in the genome. Genetic disorders may be regarded as either “dominant” or “recessive.” Recessive genetic disorders are those which require two copies (i.e., two alleles) of the abnormal/defective gene to be present. In contrast, a dominant genetic disorder involves a gene or genes which exhibit(s) dominance over a normal (functional/healthy) gene or genes. As such, in dominant genetic disorders only a single copy (i.e., allele) of an abnormal gene is required to cause or contribute to the symptoms of a particular genetic disorder. Such mutations include, for example, gain-of-function mutations in which the altered gene product possesses a new molecular function or a new pattern of gene expression. Other examples include dominant negative mutations, which have a gene product that acts antagonistically to the wild-type allele.

### Adenosine Deaminase 2 (ADA2) Deficiency

[0005] Adenosine deaminase 2 (ADA2) deficiency is caused by mutations in the ADA2 gene which severely reduce or eliminate the activity of adenosine deaminase 2. This condition is inherited in an autosomal recessive pattern. Adenosine deaminase 2 (ADA2) deficiency is characterized by abnormal inflammation of various tissues. Signs and symptoms can begin anytime from early childhood to adulthood. The severity of the disorder also varies, even among affected individuals in the same family.

### SUMMARY OF THE INVENTION

[0006] Disclosed is an approach for repairing at least one allele bearing a disease-associated mutation (“mutant allele”) by utilizing an RNA guided DNA nuclease to edit/correct/modify the nucleic acid sequence of the mutant allele such as to express a functional protein.

[0007] According to some embodiments, the present disclosure provides a method for treating, preventing or ameliorating a disease associated with a mutation in the ADA2 gene. In some embodiments, the disease-associated mutation is targeted. In some embodiments, the method further comprises the step of allele cleavage by a CRISPR nuclease. The allele cleavage is selected from the group consisting of: a double strand break (DSB) and a single strand break. In some embodiments, the CRISPR nuclease affects a double strand break (DSB). In some embodiments, the method further comprises the step of correction of the allele such that the corrected allele result in an expression of a functional ADA2 protein. In some embodiments, the correction is performed by homology directed repair (HDR).

[0008] According to embodiments of the present invention, there is provided an RNA molecule comprising a guide sequence portion having 17-25 nucleotides comprising the sequence of 20-22 contiguous nucleotides set forth in any one of SEQ ID NOs: 1-12655.

[0009] According to some embodiments of the present invention, there is provided a composition comprising an RNA molecule comprising a guide sequence portion having 17-25 nucleotides comprising the sequence of 20-25 contiguous nucleotides set forth in any one of SEQ ID NOs: 1-12655 and a CRISPR nuclease. In some embodiments, the composition further comprises a nucleic acid template for homology-directed repair, alteration, or replacement of a target sequence of an allele comprising the disease-associated mutation.

[0010] According to some embodiments of the present invention, there is provided a method for repairing/correcting a mutant ADA2 allele in a cell, the method comprising delivering to the cell a composition comprising an RNA molecule comprising a guide sequence portion having 17-25 nucleotides comprising the sequence of 20-22 contiguous nucleotides set forth in any one of SEQ ID NOs: 1-12655 and a CRISPR nuclease. In some embodiments, a nucleic acid template is further provided to the cell for homology-directed repair, alteration, or replacement of a target sequence of the mutant ADA2 allele.

[0011] According to some embodiments of the present invention, there is provided a method for treating, preventing or ameliorating ADA2 deficiency (DADA2) in a subject having DADA2, the method comprising delivering to the subject a composition comprising an RNA molecule comprising a guide sequence portion having 17-25 nucleotides comprising the sequence of 20-22 contiguous nucleotides set forth in any one of SEQ ID NOs: 1-12655 and a CRISPR nuclease. In some embodiments, a nucleic acid template is further provided to the cell for homology-directed repair, alteration, or replacement of a target DNA sequence comprising the pathogenic mutation.

[0012] In some embodiments, the method is performed ex vivo and the cell is provided/explanted from an individual patient. In some embodiments, the method further comprises the step of introducing the resulting cell, with the corrected/repaired/modified mutant ADA2 allele, into the individual patient (e.g. autologous transplantation).

[0013] According to some embodiments of the present invention, there is provided use of a composition comprising an RNA molecule comprising a guide sequence portion having 17-25 nucleotides comprising the sequence of 20-22 contiguous nucleotides set forth in any one of SEQ NOs: 1-12655 and a CRISPR nuclease for repairing/correcting/editing a mutant ADA2 allele in a cell, comprising delivering to the cell the composition comprising an RNA molecule comprising a guide sequence portion having 17-25 nucleotides comprising the sequence of 20-22 contiguous nucleotides set forth in any one of SEQ ID NOs: 1-12655 and a CRISPR nuclease.

[0014] According to embodiments of the present invention, there is provided a medicament comprising an RNA molecule comprising a guide sequence portion having 17-25 nucleotides comprising the sequence of 20-22 contiguous nucleotides set forth in any one of SEQ ID NOs: 1-12655 and a CRISPR nuclease for use in inactivating repairing/correcting/editing a mutant ADA2 allele in a cell, wherein the medicament is administered by delivering to the cell the composition comprising an RNA molecule comprising a guide sequence portion having 17-25 nucleotides comprising the sequence of 20-22 contiguous nucleotides set forth in any one of SEQ ID NOs: 1 -12655 and a CRISPR nuclease. In some embodiments, the medicament further comprises a nucleic acid template.

[0015] According to some embodiments of the present invention, there is provided use of a composition comprising an RNA molecule comprising a guide sequence portion having 17-25 nucleotides comprising the sequence of 20-22 contiguous nucleotides set forth in any one of SEQ ID NOs: 1-12655 and a CRISPR nuclease for treating ameliorating or preventing DADA2, comprising delivering to cells of a subject having or at risk of having DADA2, the composition comprising an RNA molecule comprising a guide sequence portion having 17-25 nucleotides comprising the sequence of 20-22 contiguous nucleotides set forth in any one of SEQ ID NOs: 1-12655 and a CRISPR nuclease.

[0016] According to some embodiments of the present invention, there is provided a medicament comprising the composition comprising an RNA molecule comprising a guide sequence portion having 17-25 nucleotides comprising the sequence of 20-22 contiguous nucleotides set forth in any one of SEQ ID NOs: 1-12655 and a CRISPR nuclease for use in treating ameliorating or preventing DADA2, wherein the medicament is administered by delivering to a subject having or at risk of having DADA2 the composition comprising an RNA molecule comprising a guide sequence portion having 17-25 nucleotides comprising the sequence of 20-22 contiguous nucleotides set forth in any one of SEQ NOs: 1-12655 and a CRISPR nuclease.

[0017] According to some embodiments of the present invention, there is provided a kit for correcting/repairing a mutant ADA2 allele in a cell, comprising an RNA molecule comprising a guide sequence portion having 17-25 nucleotides comprising the sequence of 20-22 contiguous nucleotides set forth in any one of SEQ ID NOs: 1-12655, a CRISPR nuclease, and optionally a tracrRNA molecule; and instructions for delivering the RNA molecule; CRISPR nuclease, and/or the tracrRNA to the cell. In some embodiment, the delivery is performed ex-vivo. In some embodiments, the delivery is performed within a subject's body. In some embodiments, the cells are HSC cell originated from the subject.

[0018] According to some embodiments of the present invention, there is provided a kit for treating DADA2 in a subject, comprising an RNA molecule comprising a guide sequence portion having 17-25 nucleotides comprising the sequence of 20-22 contiguous nucleotides set forth in any one of SEQ ID NOs: 1-12655, a CRISPR nuclease, and optionally a tracrRNA molecule; and instructions for delivering the RNA molecule; CRISPR nuclease, and optionally the tracrRNA to a subject having or at risk of having DADA2. According to some embodiments of the present invention, there is provided a kit for treating DADA2 in a subject, comprising an RNA molecule comprising a guide sequence portion having 17-25 nucleotides comprising the sequence of 20-22 contiguous nucleotides set forth in any one of SEQ ID NOs: 1-12655, a CRISPR nuclease, and optionally a tracrRNA molecule; and instructions for delivering the RNA molecule; CRISPR nuclease, and optionally the tracrRNA to cells of the subject having or at risk of having DADA2. In some embodiments, the cells are HSC cells obtained from the subject and the delivery is ex-vivo.

### BRIEF DESCRIPTION OF THE DRAWINGS

[0019] FIG. 1: Screen for activity of guides targeting ADA2 in Hela cells. spCas9 coding plasmid was co-transfected with each of the guide plasmids. Cells were harvested 72 h post DNA transfection. Genomic DNA was extracted and used for capillary electrophoreses using on-target primers which amplify the endogenous genomic regions. The graph represents the average of % editing±STDV of 3 independent experiments.

[0020] FIG. 2A: In vitro cleavage assay of guide 16, run on 1.7 agarose gel after proteinase K treatment, showing the full length template at 1000 bp (control) and the cleaved at 750 bp. * indicates non specific band.

[0021] FIG. 2B: In vitro cleavage assay of guide 12, run on 1.7% agarose gel after proteinase K treatment, showing the full length template at 1000 bp (control) and the cleaved at 500 bp.

### DETAILED DESCRIPTION

### Definitions

[0022] Unless otherwise defined, all technical and/or scientific terms used herein have the same meaning as commonly understood by one of ordinary skill in the art to which the invention pertains. Although methods and materials similar or equivalent to those described herein can be used in the practice or testing of embodiments of the invention, exemplary methods and/or materials are described below. In case of conflict, the patent specification, including definitions, will control. In addition, the materials, methods, and examples are illustrative only and are not intended to be necessarily limiting.

[0023] It should be understood that the terms “a” and “an” as used above and elsewhere herein refer to “one or more” of the enumerated components. It will be clear to one of ordinary skill in the art that the use of the singular includes the plural unless specifically stated otherwise. Therefore, the terms “a,” “an” and “at least one” are used interchangeably in this application.

[0024] For purposes of better understanding the present teachings and in no way limiting the scope of the teachings, unless otherwise indicated, all numbers expressing quantities, percentages or proportions, and other numerical values used in the specification and claims, are to be understood as being modified in all instances by the term “about.” Accordingly, unless indicated to the contrary, the numerical parameters set forth in the following specification and attached claims are approximations that may vary depending upon the desired properties sought to be obtained. At the very least, each numerical parameter should at least be construed in light of the number of reported significant digits and by applying ordinary rounding techniques.

[0025] Unless otherwise stated, adjectives such as “substantially” and “about” modifying a condition or relationship characteristic of a feature or features of an embodiment of the invention, are understood to mean that the condition or characteristic is defined to within tolerances that are acceptable for operation of the embodiment for an application for which it is intended. Unless otherwise indicated, the word “or” in the specification and claims is considered to be the inclusive “or” rather than the exclusive or, and indicates at least one of, or any combination of items it conjoins.

[0026] In the description and claims of the present application, each of the verbs, “comprise,” “include” and “have” and conjugates thereof, are used to indicate that the object or objects of the verb are not necessarily a complete listing of components, elements or parts of the subject or subjects of the verb. Other terms as used herein are meant to be defined by their well-known meanings in the art.

[0027] The “guide sequence portion” of an RNA molecule refers to a nucleotide sequence that is capable of hybridizing to a specific target DNA sequence, e.g., the guide sequence portion has a nucleotide sequence which is fully complementary to the target DNA sequence. In some embodiments, the guide sequence portion is 17, 18, 19, 20, 21, 22, 23, 24 or 25 nucleotides in length, or approximately 17-25, 17-24, 18-22, 19-22, 18-20, 17-20, 21-22, 20-23, or 17-22 nucleotides in length. The guide sequence portion may be part of an RNA molecule that can form a complex with a CRISPR nuclease with the guide sequence portion serving as the DNA targeting portion of the CRISPR complex. When the DNA molecule having the guide sequence portion is present contemporaneously with the CRISPR molecule the RNA molecule is capable of targeting the CRISPR nuclease to the specific target DNA sequence. Each possibility represents a separate embodiment. An RNA molecule can be custom designed to target any desired sequence.

[0028] In embodiments of the present invention, an RNA molecule comprises a guide sequence portion having 17-25 nucleotides comprising the sequence of 20-22 contiguous nucleotides set forth in any one of SEQ ID NOs: 1-12655. In embodiments of the present invention, an RNA molecule comprises a guide sequence portion having 17-22 nucleotides in the sequence of 20-22 contiguous nucleotides set forth in any one of SEQ ID NOs: 1-12655.

[0029] As used herein, “contiguous nucleotides” set forth in a SEQ ID NO refers to nucleotides in a sequence of nucleotides in the order set forth in the SEQ ID NO without any intervening nucleotides. Sequences comprising the SEQ ID NO in which one or more of the nucleotides is chemically modified (i.e., having a backbone modification) are also encompassed.

[0030] Exemplary modifications to polynucleotides may be synthetic and encompass polynucleotides which contain nucleotides comprising bases other than the naturally occurring adenine, cytosine, thymine, uracil, or guanine bases. Modifications to polynucleotides include polynucleotides which contain synthetic, non-naturally occurring nucleosides e.g., locked nucleic acids. Modifications to polynucleotides may be utilized to increase or decrease stability of an RNA. As described herein, an example of a modified polynucleotide is an mRNA containing 1-methyl pseudo-uridine. For examples of modified polynucleotides and their uses, see U.S. Pat. No. 8,278,036. PCT International Publication No. WO/2015/006747, and Weissman and Kariko, 2015, (9):1416-7, hereby incorporated by reference.

[0031] In embodiments of the present invention, the guide sequence portion may be 20 nucleotides in length and consists of 20 nucleotides in the sequence of 20 contiguous nucleotides set forth in any one of SEQ ID NOs listed in Column 2 of Table 1. In embodiments of the present invention, the guide sequence portion may be 21 nucleotides in length and consists of 21 nucleotides in the sequence of 21 contiguous nucleotides set forth in any one of SEQ ID NOs listed in Column 3 of Table 1. In embodiments of the present invention, the guide sequence portion may be 22 nucleotides in length and consists of 22 nucleotides in the sequence of 22 contiguous nucleotides set forth in any one of SEQ ID NOs listed in Column 4 of Table 1.

[0032] In embodiments of the present invention, the guide sequence portion may be less than 20 nucleotides in length. For example, in embodiments of the present invention the guide sequence portion may be 17, 18, or 19 nucleotides in length. In such embodiments the guide sequence portion may consist of 17, 18, or 19 nucleotides, respectively, in the sequence of 20-22 contiguous nucleotides set forth in any one of SEQ ID NOs: 1-12655. For example, a guide sequence portion having 17 nucleotides in the sequence of 17 contiguous nucleotides set forth in SEQ ID NO: 9239 may consist of any one of the following nucleotide sequences (nucleotides excluded from the contiguous sequence are marked in strike-through):

SEQ ID NO: 9239 -
ACAUUCCUCACCAGCCAGUC

17 nucleotide guide sequence 1:
UUCCUCACCAGCCAGUC
(SEQ ID NO: 12656)
17 nucleotide guide sequence 2:
AUUCCUCACCAGCCAGU
(SEQ ID NO: 12657)
17 nucleotide guide sequence 3:
CAUUCCUCACCAGCCAG
(SEQ ID NO: 12658)
17 nucleotide guide sequence 4:
ACAUUCCUCACCAGCCA
(SEQ ID NO: 12659)

[0033] In embodiments of the present invention, the guide sequence portion may be greater than 22 nucleotides in length. For example, in embodiments of the present invention the guide sequence portion may be 23, 24 or 25 nucleotides in length. In such embodiments the guide sequence portion comprises: (a) 20 nucleotides in the sequence of 20 contiguous nucleotides set forth in any one of SEQ ID NOs listed in Column 2 of Table 1, (b) 21 nucleotides in the sequence of 21 contiguous nucleotides set forth in any one of SEQ ID NOs listed in Column 3 of Table 1, or (c) 22 nucleotides in the sequence of 22 contiguous nucleotides set forth in any one of SEQ ID NOs listed in Column 4 of Table 1; and additional nucleotides fully complimentary to a nucleotide or sequence of nucleotides adjacent to the 3′ end of the target sequence, 5′ end of the target sequence, or both.

[0034] In embodiments of the present invention, a CRISPR nuclease and an RNA molecule comprising a guide sequence portion form a CRISPR complex that binds to a target DNA sequence to effect cleavage of the target DNA sequence, CRISPR nucleases, e.g. Cpf1, may form a CRISPR complex comprising a CRISPR nuclease and RNA molecule without a further tracrRNA molecule. Alternatively, CRISPR nucleases, e.g. Cas9, may form a CRISPR complex between the CRISPR nuclease, an RNA molecule comprising a guide sequence portion of the present invention, and a tracrRNA molecule.

[0035] In embodiments of the present invention, the RNA molecule may further comprise the sequence of a tracrRNA molecule. Such embodiments may be designed as a synthetic fusion of the guide portion of the RNA molecule and the trans-activating crRNA (tracrRNA). (See Jinek (2012) Science). Embodiments of the present invention may also form CRISPR complexes utilizing a separate tracrRNA molecule and a separate RNA molecule comprising a guide sequence portion. In such embodiments the tracrRNA molecule may hybridize with the RNA molecule via basepairing and may be advantageous in certain applications of the invention described herein.

[0036] The term “tracr mate sequence” refers to a sequence sufficiently complementary to a tracrRNA molecule so as to hybridize to the tracrRNA via basepairing and promote the formation of a CRISPR complex. (See e.g., U.S. Pat. No. 8,906,616). In embodiments of the present invention, the RNA molecule may further comprise a portion having a tracr mate sequence.

[0037] A “gene,” for the purposes of the present disclosure, includes a DNA region encoding a gene product such as RNA or protein product, including all transcribed regions such as introns and exons, as well as all DNA regions which regulate the production of the gene product, whether or not such regulatory sequences are adjacent to coding and/or transcribed sequences. Accordingly, a gene includes, but is not necessarily limited to, promoter sequences, terminators, translational regulatory sequences such as ribosome binding sites and internal ribosome entry sites, enhancers, silencers, insulators, boundary elements, replication origins, matrix attachment sites and locus control regions.

[0038] “Eukaryotic” cells include, but are not limited to fungal cells (such as yeast), plant cells, animal cells, mammalian cells and human cells.

[0039] The term “nuclease” as used herein refers to an enzyme capable of cleaving the phosphodiester bonds between the nucleotide subunits of nucleic acid. A nuclease may be isolated or derived from a natural source. The natural source may be any living organism. Alternatively, a nuclease may be a modified or a synthetic protein which possesses the phosphodiester bond cleaving activity. Gene modification can be achieved using a nuclease, for example a CRISPR nuclease.

[0040] The term “homology-directed repair” or “HDR” refers to a mechanism for repairing DNA damage in cells, for example, during repair of double-stranded and single-stranded breaks in DNA. HDR requires nucleotide sequence homology and uses a “nucleic acid template” (nucleic acid template or donor template used interchangeably herein) to repair the sequence where the double-stranded or single break occurred (e.g., DNA target sequence). This results in the transfer of genetic information from, for example, the nucleic acid template to the DNA target sequence. HDR may result in alteration of the DNA target sequence (e.g., insertion, deletion, mutation) if the nucleic acid template sequence differs from the DNA target sequence and part or all of the nucleic acid template polynucleotide or oligonucleotide is incorporated into the DNA target sequence. In some embodiments, an entire nucleic acid template polynucleotide, a portion of the nucleic acid template polynucleotide, or a copy of the nucleic acid template is integrated at the site of the DNA target sequence.

[0041] The term “nucleic acid template” refers to a nucleotide sequence that is inserted or copied into a genome. The nucleic acid template comprises a nucleotide sequence, e.g., of one or more nucleotides, that will be added to or will template a change in the target nucleic acid or may be used to modify the target sequence. A nucleic acid template sequence may be of any length, for example between 2 and 10,000 nucleotides in length (or any integer value there between or there above), preferably between about 100 and 1,000 nucleotides in length (or any integer there between), more preferably between about 200 and 500 nucleotides in length. A nucleic acid template may be a single stranded nucleic acid, a double stranded nucleic acid. In some embodiment, the nucleic acid template comprises a nucleotide sequence, e.g., of one or more nucleotides, that corresponds to wild type sequence of the target nucleic acid, e.g., of the target position.

### Embodiments

[0042] The present disclosure provides a method for utilizing a CRISPR complex to treat, prevent or ameliorate a disease associated mutation for targeting at least one of two alleles of a gene bearing a mutation causing a disease phenotype. In some embodiments, a disease associated mutation is targeted for distinguishing/discriminating between two alleles of a gene, a first allele bearing the disease associated mutation, and the other allele not bearing the same disease associated mutation (bearing a different disease associated mutation). In some embodiments, the method further comprises the step of allele cleavage by a CRISPR nuclease. The allele cleavage is selected from the group consisting of: a double strand break and a single strand break. In some embodiments, the method further comprises the step of correction of the allele such that the corrected allele result in an expression of a functional ADA2 protein. In some embodiments, the correction is performed by homology directed repair (HDR). In some embodiments, the method further comprises the step of editing/correcting/modifying a sequence of the first allele such as to allow expression of a functional ADA2 protein. In some embodiments, the method further comprises the step of editing/correcting/modifying sequences of the two alleles such as to allow expression of a functional ADA2 protein.

[0043] According to embodiments of the present invention, there is provided an RNA molecule comprising a guide sequence portion having 17-25 nucleotides in the sequence of 20-22 contiguous nucleotides set forth in any one of SEQ ID NOs: 1-12655.

[0044] According to embodiments of the present invention, an RNA molecule may further comprise a portion having a sequence which binds to a CRISPR nuclease.

[0045] According to embodiments of the present invention, the sequence which binds to a CRISPR nuclease is a tracrRNA sequence.

[0046] According to embodiments of the present invention, an RNA molecule may further comprise a portion having a tracr mate sequence.

[0047] According to embodiments of the present invention, an RNA molecule may further comprise one or more linker portions.

[0048] According to embodiments of the present invention, an RNA molecule may be up to 500, 400, 300, 290, 280, 270, 260, 250, 240, 230, 220, 210, 200, 190, 180, 170, 160, 150, 140, 130, 120, 110, or 100 nucleotides in length. Each possibility represents a separate embodiment. In embodiments of the present invention, the RNA molecule may be 17 up to 300 nucleotides in length, 30 up to 30 nucleotides in length, 100 up to 300 nucleotides in length, 150 up to 300 nucleotides in length, 200 up to 300 nucleotides in length, 100 to 200 nucleotides in length, or 150 up to 250 nucleotides in length. Each possibility represents a separate embodiment.

[0049] According to some embodiments of the present invention, there is provided a composition comprising an RNA molecule comprising a guide sequence portion haying 17-25 nucleotides in the sequence of 20-22 contiguous nucleotides set forth in any one of SEQ ID NOs: 1-12655 and a CRISPR nuclease. According to some embodiments of the present invention, there is provided a composition comprising an RNA molecule comprising a guide sequence portion having 17-22 nucleotides in the sequence of 20-22 contiguous nucleotides set forth in any one of SEQ ID NOs: 1-12655 and a CRISPR nuclease.

[0050] According to embodiments of the present invention, the composition may comprise a nucleic acid template for homology-directed repair, alteration, or replacement of a target DNA sequence comprising the pathogenic mutation (e. g., allele bearing a disease-associated mutation two alleles bearing one or more disease-associated mutation, two allele bearing a disease-associated mutation).

[0051] According to embodiments of the present invention, the composition comprises a first and a second RNA molecule each comprising a guide sequence portion having 17-25 nucleotides in the sequence of 20-22 contiguous nucleotides set forth in any one of SEQ ID NOs: 1-12655, wherein the sequence of the guide sequence portion of the first RNA molecule is different from the sequence of the guide sequence portion of the second RNA molecule.

[0052] According to some embodiments of the present invention, there is provided a method for repairing/correcting a mutant ADA2 allele in a cell, the method comprising delivering to the cell a composition comprising an RNA molecule comprising a guide sequence portion having 17-25 nucleotides comprising the sequence of 20-22 contiguous nucleotides set forth in any one of SEQ ID NOs: 1-12655 and a CRISPR nuclease. According to some embodiments of the present invention, there is provided a method for repairing/correcting a mutant ADA2 allele in a cell, the method comprising delivering to the cell a composition comprising an RNA molecule comprising a guide sequence portion having 17-22 nucleotides in the sequence of 20-22 contiguous nucleotides set forth in any one of SEQ ID NOs: 1-12655 and a CRISPR nuclease.

[0053] According to some embodiments of the present invention, there is provided a method for treating DADA2, the method comprising delivering to a subject or cell obtained from a subject having DADA2 a composition comprising an RNA molecule comprising a guide sequence portion having 17-25 nucleotides comprising the sequence of 20-22 contiguous nucleotides set forth in any one of SEQ ID NOs: 1-12655 and a CRISPR nuclease. According to some embodiments of the present invention, there is provided a method for treating DADA2, the method comprising delivering to a subject or cell obtained from a subject having DADA2 a composition comprising an RNA molecule comprising a guide sequence portion having 17-22 nucleotides in the sequence of 20-22 contiguous nucleotides set forth in any one of SEQ ID NOs: 1-12655 and a CRISPR nuclease.

[0054] In a non-limiting example, an RNA molecule comprising a guide sequence is utilized to direct a CRISPR nuclease to a mutant allele and create a double-strand break (DSB) and correction/repair of the mutant allele is further performed, such as by utilizing homology directed repair (HDR), which incorporates a homologous strand as a repair template.

[0055] According to embodiments of the present invention, the CRISPR nuclease and the RNA molecule or RNA molecules are delivered to the subject and/or cells obtained from the subject substantially at the same time or at different times.

[0056] According to embodiments of the present invention, the tracrRNA is delivered to the subject and/or cells obtained from the subject substantially at the same time or at different times as the CRISPR nuclease and RNA molecule or RNA molecules.

[0057] According to embodiments of the present invention, the nucleic acid template is delivered to the subject and/or cells obtained from the subject substantially at the same time or at different times as the CRISPR nuclease and RNA molecule or RNA molecules.

[0058] According to embodiments of the present invention, the method comprises obtaining the cell with a mutant ADA2 allele from a subject with a mutant ADA2 allele and which subject is (a) homozygous for the mutant ADA2 allele, or (b) heterozygous for the mutant ADA2 allele and a second, different mutant ADA2 allele. In an embodiment, the method comprises obtaining the cell from the subject by mobilization and/or by apheresis. In an embodiment, the method comprises obtaining the cell from the subject by bone marrow aspiration.

[0059] In embodiments in which the subject/cell bears two heterozygous mutant ADA2 alleles (e.g., in case of compound heterozygous mutations), a first allele comprising a first mutation and a second allele comprising a second mutation, the correction strategies include: (a) utilizing a gRNA sequence to apply a DSB in a first allele comprising a first mutation or (b) utilizing a gRNA sequence to apply a DSB in a first allele comprising a first mutation and a second gRNA sequence to apply a DSB in a second allele comprising a second mutation.

[0060] According to some embodiments of the present invention, the RNA molecule targets a disease-causing mutation in only one of the two different mutant alleles. According to some embodiments of the present invention, the RNA molecule targets a disease-causing mutation that is common to both mutant alleles of ADA2. According to some embodiments of the present invention, the RNA molecule comprises a first guide sequence that targets a disease-causing mutation in one of the two different mutant alleles and a second guide sequence that targets a disease-causing mutation in the other of the two different mutant alleles. According to some embodiments of the present invention, the RNA molecule targets a disease-causing mutation in one of the two different mutant alleles and a second RNA molecule comprising a second guide sequence targets a disease-causing mutation in the other of the two different mutant alleles.

[0061] In embodiments where the first and second guide sequences are on two separate RNA molecules, the two separate RNA molecules may be delivered to the cells substantially at the same time or at different times.

[0062] In an embodiment of the method of correcting a mutant ADA2 allele in a cell, the cell is prestimulated prior to introducing the composition to the cell. In an embodiment, delivering the composition comprises electroporation of the cell or cells

[0063] In an embodiment of the method of correcting a mutant ADA2 allele in a cell, the method comprises culture expanding the cell to obtain cells. In an embodiment the cells are cultured the cells are cultured with: (a) one or more of: stem cell factor (SCF), IL-3, and GM-CSF; and/or (b) at least one cytokine, wherein the at least one cytokine is preferably a recombinant human cytokine.

[0064] According to some embodiments of the present invention, there is provided a modified cell obtained by the methods described herein. In an embodiment, the modified cells are obtained from culture expanding the modified cell obtained by the methods described herein. In an embodiment, the modified cells are capable of engraftment. In an embodiment, the modified cells are capable of giving rise to progeny cells. In an embodiment, the modified cells are capable of giving rise to progeny cells after engraftment. In an embodiment, the modified cells are capable of giving rise to progeny cells after an autologous engraftment. In an embodiment, the modified cells are capable of giving rise to progeny cells for at least 12 months or at least 24 months after engraftment.

[0065] In an embodiment the modified cell or cells are hematopoietic stem cells and/or progenitor cells (HSPCs), preferably wherein the modified cell or cells are CD34+ hematopoietic stem cells. In an embodiment the modified cell or cells are bone marrow cells or peripheral mononucleated cells (PMCs).

[0066] According to some embodiments of the present invention, there is provided a composition/kit comprising the modified cells and a pharmaceutically acceptable carrier. Also provided is an in vitro or ex vivo method of preparing this composition, comprising mixing the modified cells of the invention with the pharmaceutically acceptable carrier.

[0067] In some embodiments, the method further comprises, utilizing a nucleic acid template for homology-directed repair, alteration, or replacement of the entire exon or a portion of the exon or multiple exons or the entire open reading frame of a gene, or the entire gene.

[0068] According to some embodiments of the present invention, there is provided a method of treating a subject afflicted with Adenosine deaminase 2 (ADA2) deficiency, comprising administration of a therapeutically effective amount of the modified cells the invention, the composition comprising the modified cells of the invention and a pharmaceutically acceptable carrier, the cells obtained by the methods of the invention, or a composition prepared by the in vitro or ex vivo method of preparing the composition comprising the modified cells of the invention and a pharmaceutically acceptable carrier.

[0069] According to some embodiments of the present invention, there is provided use of an RNA molecule of the invention for correcting a mutant ADA2 allele in a cell.

[0070] According to some embodiments of the present invention, there is provided use of a composition comprising an RNA molecule comprising a guide sequence portion having 17-25 (e.g., 17-20, 17-21, 17-22, 17-23, 17-24, 20-24, etc.) nucleotides comprising the sequence of 20-22 contiguous nucleotides set forth in any one of SEQ ID NOs: 1-12655 and a CRISPR nuclease repairing/correcting/modifying a mutant ADA2 allele in a cell, comprising delivering to the cell the RNA molecule comprising a guide sequence portion having 17-25 (e.g., 17-20, 17-21, 17-22, 17-23, 17-24, 20-24, etc.) nucleotides in the sequence of 20-22 contiguous nucleotides set forth in any one of SEQ ID NOs: 1-12655 and the CRISPR nuclease.

[0071] According to embodiments of the present invention, there is provided a medicament comprising an RNA molecule comprising a guide sequence portion having 17-25 (e.g., 17-20, 17-21, 17-22, 17-23, 17-24, 20-24, etc.) nucleotides comprising the sequence of 20-22 contiguous nucleotides set forth in any one of SEQ ID NOs: 1-12655 and a CRISPR nuclease for use in repairing/correcting/modifying a mutant ADA2 allele in a cell, wherein the medicament is administered by delivering to the cell the composition comprising an RNA molecule comprising a guide sequence portion having 17-25 (e.g., 17-20, 17-21, 17-22, 17-23, 17-24, 20-24, etc.) nucleotides in the sequence of 20-22 contiguous nucleotides set forth in any one of SEQ ID NOs: 1-12655 and a CRISPR nuclease.

[0072] According to some embodiments of the present invention, there is provided use of a composition comprising an RNA molecule comprising a guide sequence portion having 17-25 (e.g., 17-20, 17-21, 17-22, 17-23, 17-24, 20-24, etc.) nucleotides comprising the sequence of 20-22 contiguous nucleotides set forth in any one of SEQ ID NOs: 1-12655 and a CRISPR nuclease for treating ameliorating or preventing DADA2, comprising delivering to a subject having or at risk of having DADA2 the composition of comprising an RNA molecule comprising a guide sequence portion having 17-25 (e.g., 17-20, 17-21, 17-22, 17-23, 17-24, 20-24, etc.) nucleotides comprising the sequence of 20-22 contiguous nucleotides set forth in any one of SEQ ID NOs: 1-12655 and a CRISPR nuclease.

[0073] According to some embodiments of the present invention, there is provided a medicament comprising the composition comprising an RNA molecule comprising a guide sequence portion having 17-25 (e.g., 17-20, 17-21, 17-22, 17-23, 17-24, 20-24, etc.) nucleotides comprising the sequence of 20-22 contiguous nucleotides set forth in any one of SEQ ID NOs: 1-12655 and a CRISPR nuclease for use in treating ameliorating or preventing DADA2, wherein the medicament is administered by delivering to a subject having or at risk of having DADA2: the composition comprising an RNA molecule comprising a guide sequence portion having 17-25 (e.g., 17-20, 17-21, 17-22, 17-23, 17-24, 20-24, etc.) nucleotides comprising the sequence of 20-22 contiguous nucleotides set forth in any one of SEQ NOs: 1-12655 and a CRISPR nuclease. In some embodiments, the medicament further comprises, a nucleic acid template for homology-directed repair, alteration, or replacement of at least a portion of a target gene.

[0074] According to some embodiments of the present invention, there is provided a kit for repairing/correcting/modifying a mutant DADA2 allele in a cell, comprising an RNA molecule comprising a guide sequence portion having 17-25 (e.g., 17-20, 17-21, 17-22, 17-23, 17-24, 20-24, etc.) nucleotides comprising the sequence of 20-22 contiguous nucleotides set forth in any one of SEQ ID NOs: 1-12655, a CRISPR nuclease, and/or a tracrRNA molecule; and instructions for delivering the RNA molecule; CRISPR nuclease, and/or the tracrRNA to the cell. In some embodiments, the kit further comprises, a nucleic acid template for homology-directed repair, alteration, or replacement of of at least a portion of a target gene.

[0075] According to some embodiments of the present invention, there is provided a kit for treating DADA2 in a subject, comprising an RNA molecule comprising a guide sequence portion having 17-25 (e.g., 17-20, 17-21, 17-22, 17-23, 17-24, 20-24, etc.) nucleotides comprising the sequence of 20-22 contiguous nucleotides set forth in any one of SEQ ID NOs: 1-12655, a CRISPR nuclease, and/or a tracrRNA molecule; and instructions for delivering the RNA molecule; CRISPR nuclease, and/or the tracrRNA to a subject having or at risk of having DADA2. in some embodiments, the kit further comprises, a nucleic acid template for homology-directed repair, alteration, or replacement of at least a portion of a target gene.

[0076] In embodiments of the present invention, the RNA molecule comprises a guide sequence portion having 17-25 (e.g., 17-20, 17-21, 17-22, 17-23, 17-24, 20-24, etc.) nucleotides comprising the sequence of 20-22 contiguous nucleotides set forth in any one of SEQ ID NOs: 1-12655. In embodiments of the present invention, the RNA molecule comprises a guide sequence portion having 17-22 nucleotides in the sequence of 20-22 contiguous nucleotides set forth in any one of SEQ ID NOs: 1-12655.

[0077] The compositions and methods of the present disclosure may be utilized for treating, preventing, ameliorating, or slowing progression of DADA2.

[0078] In some embodiments, the method of repairing/correcting a mutant allele further comprises enhancing activity of the functional protein such as by providing a protein/peptide, a nucleic acid encoding a protein/peptide, or a small molecule such as a chemical compound, capable of activating/enhancing activity of the functional protein.

[0079] According to some embodiments, the present disclosure provides an RNA sequence (‘RNA molecule’) which binds to/associates with and/or directs the RNA guided DNA nuclease e.g., CRISPR nuclease to a sequence comprising at least one nucleotide which differs between a first mutant allele and a second mutant allele (e.g., different disease associated mutation) of a gene of interest.

[0080] In some embodiments, the method comprises the steps of: contacting a first mutant allele (i.e., a first of two mutant alleles bearing the same or a different disease associated mutation) of a gene of interest with an allele-specific RNA molecule and a CRISPR nuclease e.g., a Cas9 protein, wherein the allele-specific RNA molecule and the CRISPR nuclease e.g., Cas9 associate with a nucleotide sequence of the first mutant allele of the gene of interest which differs by at least one nucleotide from a nucleotide sequence of a second allele of the gene of interest (i.e., a second mutant allele of the two mutant alleles), thereby modifying the first mutant allele.

[0081] In some embodiments, the allele-specific RNA molecule and a CRISPR nuclease are introduced to a cell encoding the gene of interest. In some embodiments, the cell encoding the gene of interest is in a mammalian subject. In some embodiments, the cell encoding the gene of interest is an eukaryotic cell. In some embodiments, the cell encoding the gene of interest is a mammalian cell.

[0082] In some embodiments, a nucleic acid template is further introduced to the cell encoding the gene of interest for homology-directed repair, alteration, or replacement of a target sequence of the gene of interest to correct/repair the gene of interest such as to express a functional protein.

[0083] In some embodiments, the mutant allele is an allele of the ADA2 gene. In some embodiments, a disease-causing mutation within a mutated ADA2 allele is targeted.

[0084] In some embodiments, the method is utilized for treating a subject having a disease phenotype resulting from the ADA2 gene. In such embodiments, the method results in improvement, amelioration or prevention of the disease phenotype.

[0085] Embodiments referred to above refer to a CRISPR nuclease, RNA molecule(s), and optionally tracrRNA being effective in a subject or cells at the same time. The CRISPR, RNA molecule(s), and optionally tracrRNA can be delivered substantially at the same time or can be delivered at different times but have effect at the same time. For example, this includes delivering the CRISPR nuclease to the subject or cells before the RNA molecule and/or tracr RNA is substantially extant in the subject or cells.

[0086] In one embodiment, the cell is a stem cell. In one embodiment, the cell is an embryonic stem cell. In some embodiment, the stem cell is a hematopoietic stem/progenitor cell (HSC). As used herein, the term HSC refers to both hematopoietic stem cells and hematopoietic stem progenitor cells. Non-limiting examples of stem cells include hone marrow cells, myeloid progenitor cells, a multipotent progenitor cells, a lineage restricted progenitor cells.

[0087] As used herein, “progenitor cell” refers to a lineage cell that is derived from stem cell and retains mitotic capacity and multipotency (e.g., can differentiate or develop into more than one but not all types of mature lineage of cell). As used herein “hematopoiesis” or “hemopoiesis” refers to the formation and development of various types of blood cells (e.g., red blood cells, megakaryocytes, myeloid cells (e.g., monocytes, macrophages and neutrophil), and lymphocytes) and other formed elements in the body (e.g., in the bone marrow).

### Recessive Genetic Disorders

[0088] One of skill in the art will appreciate that all subjects with any type of recessive genetic disorder may be subjected to the methods described herein. In one embodiment, the present invention may be used to target a gene involved in, associated with, or causative of a recessive genetic disorders such as, for example DADA2. In some embodiments, the recessive genetic disorder is DADA2. In some embodiments, the target gene is the ADA2 gene (Entrez Gene, gene ID No: 51816). DADA2 is a recessive genetic condition caused by mutations in the CECR1(ADA2) gene that prevent it from correctly encoding the enzyme Adenosine Deaminase 2 (ADA2). Some patients are homozygous, while others are compound heterozygous and have two different mutations.

### CRISPR Nucleases and PAM Recognition

[0089] In some embodiments, the sequence specific nuclease is selected from CRISPR nucleases, or a functional variant thereof. In some embodiments, the sequence specific nuclease is an RNA guided DNA nuclease. In such embodiments, the RNA sequence which guides the RNA guided DNA nuclease (e.g., Cpf1) binds to and/or directs the RNA guided DNA nuclease to the sequence comprising the mutation. In some embodiments, the CRISPR complex does not further comprise a tracrRNA. In a non-limiting example, in which the RNA guided DNA nuclease is a CRISPR protein, the at least one nucleotide which differs between a target allele (e.g., bearing a pathogenic mutation) and the other allele (e.g., bearing a different or the same pathogenic mutation) may be within the PAM site and/or proximal to the PAM site within the region that the RNA molecule is designed to hybridize to. A skilled artisan will appreciate that RNA molecules can be engineered to bind to a target of choice in a genome by commonly known methods in the art.

[0090] In embodiments of the present invention, a type II CRISPR system utilizes a mature crRNA:tracrRNA complex directs a CRISPR nuclease, e.g. Cas9, to the target DNA via Watson-Crick base-pairing between the crRNA and the protospacer on the target DNA next to the protospacer adjacent motif (PAM), an additional requirement for target recognition. The CRISPR nuclease then mediates cleavage of target DNA to create a double-stranded break within the protospacer. A skilled artisan will appreciate that each of the engineered RNA molecule of the present invention is further designed such as to associate with a target genomic DNA sequence of interest next to a protospacer adjacent motif (PAM), e.g., a PAM matching the sequence relevant for the type of CRISPR nuclease utilized, such as for a non-limiting example, NGG or NAG, wherein “N” is any nucleobase, for Streptococcus pyogenes Cas9 WT (SpCAS9); NNGRRT for Staphylococcus aureus (SaCas9); NNNVRYM for Jejuni Cas9 WT; NGAN or NGNG for SpCas9-VQR variant; NGCG for SpCas9-VRER variant; NGAG for SpCas9-EQR variant; NNNNGATT for Neisseria meningitidis (NmCas9); or TTTV for Cpf1. RNA molecules of the present invention are each designed to form complexes in conjunction with one or more different CRISPR nucleases and designed to target polynucleotide sequences of interest utilizing one or more different PAM sequences respective to the CRISPR nuclease utilized.

[0091] In some embodiments, an RNA-guided DNA nuclease e.g., a CRISPR nuclease, may be used to cause a DNA break at a desired location in the genome of a cell. The most commonly used RNA-guided DNA nucleases are derived from CRISPR systems, however, other RNA-guided DNA nucleases are also contemplated for use in the genome editing compositions and methods described herein. For instance, see U.S. Patent Publication No. 2015-0211023, incorporated herein by reference.

[0092] CRISPR systems that may be used in the practice of the invention vary greatly, CRISPR systems can be a type I, a type II, or a type III system. Non-limiting examples of suitable CRISPR proteins include Cas3, Cas4, Cas5, Cas5e (or CasD), Cas6, Cas6e, Cas6f, Cas7, Cas8a1, Cas8a2, Cas8b, Cas8c, Cas9, Cas10, Cas1 Od, CasF, CasG, CasH, Csy1, Csy2, Csy3, Cse1 (or CasA), Cse2 (or CasB), Cse3 (or CasE), Cse4 (or CasC), Csc1, Csc2, Csa5, Csn2, Csm2, Csm3, Csm4, Csm5, Csm6, Cmr1, Cmr3, Cmr4, Cmr5, Cmr6, Csb1, Csb2, Csb3, Csx17, Csx14, Csx10 Csx16, CsaX, Csx3, Csz1, Csx15, Csf1, Csf2, Csf3, Csf4, and Cu1966.

[0093] In some embodiments, the RNA-guided DNA nuclease is a CRISPR nuclease derived from a type II CRISPR system (e.g., Cas9). The CRISPR nuclease may be derived from Streptococcus pyogenes, Streptococcus thermophilus, Streptococcus sp., Staphylococcus aureus, Neisseria meningitidis, Treponerma denticola, Nocardiopsis dassonvillei, Streptomyces pristinaespiralis, Streptomyces viridochromogenes, Streptomyces viridochromogenes, Streptosporangium roseum, Streptosporangium roseum, Alicyclobacillus acidocaldarius, Bacillus pseudomycoides, Bacillus selenitireducens, Exiguobacterium sibiricum, Lactobacillus delbrueckii, Lactobacillus salivarius, Microscilla marina, Burkholderiales bacterium, Polaromonas naphthalenivorans, Polaromonas sp., Crocosphaera watsonii, Cyanothece sp., Microcystis aeruginosa, Synechococcus sp., Acetohalobium arabaticum, Ammonifex degensii, Caldicelulosiruptor becscii, Candidatus Desulforudis, Clostridium botulinum, Clostridium difficile, Finegoldia magna, Natranaerobius thermophilus, Pelotomaculum thermopropionicum, Acidithiobacillus caldus, Acidithiobacillus ferrooxidans, Allochromatium vinosum, Marinobacter sp., Nitrosococcus halophilus, Nitrosococcus watsoni, Pseudoalteromonas haloplanktis, Ktedonobacter racemifer, Methanohalobium evestigatum, Anabaena variabilis, Nodularia spumigena, Nostoc sp., Arthrospira maxima, Arthrospira platensis, Arthrospira sp., Lyngbya sp., Microcoleus chthonoplastes, Oscillatoria sp., Petrotoga mobilis, Thermosipho africanus, Acaryochloris marina, or any species which encodes a CRISPR nuclease with a known PAM sequence. CRISPR nucleases encoded by uncultured bacteria may also be used in the context of the invention. (See Burstein et al. Nature, 2017). Variants of CRIPSR proteins having known PAM sequences e.g., spCas9 D1135E variant, spCas9 VQR variant, spCas9 EQR variant, or spCas9 VRER variant may also be used in the context of the invention.

[0094] Thus, an RNA guided DNA nuclease of a CRISPR system, such as a Cas9 protein or modified Cas9 or homolog or ortholog of Cas9, or other RNA guided DNA nucleases belonging to other types of CRISPR systems, such as Cpf1 and its homologs and orthologs, may be used in the compositions of the present invention.

[0095] In certain embodiments, the CRIPSR nuclease may be a “functional derivative” of a naturally occurring Cas protein. A “functional derivative” of a native sequence polypeptide is a compound having a qualitative biological property in common with a native sequence polypeptide. “Functional derivatives” include, but are not limited to, fragments of a native sequence and derivatives of a native sequence polypeptide and its fragments, provided that they have a biological activity in common with a corresponding native sequence polypeptide. A biological activity contemplated herein is the ability of the functional derivative to hydrolyze a DNA substrate into fragments. The term “derivative” encompasses both amino acid sequence variants of polypeptide, covalent modifications, and fusions thereof. Suitable derivatives of a Cas polypeptide or a fragment thereof include but are not limited to mutants, fusions, covalent modifications of Cas protein or a fragment thereof. Cas protein, which includes Cas protein or a fragment thereof, as well as derivatives of Cas protein or a fragment thereof, may be obtainable from a cell or synthesized chemically or by a combination of these two procedures. The cell may be a cell that naturally produces Cas protein, or a cell that naturally produces Cas protein and is genetically engineered to produce the endogenous Cas protein at a higher expression level or to produce a Cas protein from an exogenously introduced nucleic acid, which nucleic acid encodes a Cas that is same or different from the endogenous Cas. In some cases, the cell does not naturally produce Cas protein and is genetically engineered to produce a Cas protein.

[0096] In some embodiments, the CRISPR nuclease is Cpf1. Cpf1 is a single RNA-guided endonuclease which utilizes a T-rich protospacer-adjacent motif. Cpf1 cleaves DNA via a staggered DNA double-stranded break. Two Cpf1 enzymes from Acidaminococcus and Lachnospiraceae have been shown to carry out efficient genome-editing activity in human cells. (See Zetsche et al. (2015) Cell.).

[0097] Thus, an RNA guided DNA nuclease of a Type II CRISPR System, such as a Cas9 protein or modified Cas9 or homologs, orthologues, or variants of Cas9, or other RNA guided DNA nucleases belonging to other types of CRISPR systems, such as Cpf1 and its homologs, orthologues, or variants, may be used in the present invention.

[0098] In some embodiments, the guide molecule comprises one or more chemical modifications which imparts a new or improved property (e.g., improved stability from degradation, improved hybridization energetics, or improved binding properties with an RNA guided DNA nuclease). Suitable chemical modifications include, but are not limited to: modified bases, modified sugar moieties, or modified inter-nucleoside linkages. Non-limiting examples of suitable chemical modifications include: 4-acetylcytidine, 5-(carboxyhydroxymethyl)uridine, 2′-O-methylcytidine, 5-carboxymethylaminomethyl-2-thiouridine, 5-carboxymethylaminomethyluridine, dihydrouridine, 2′-O-methylpseudouridine, “beta, D-galactosylquenosine”, 2′-O-methylguanosine, inosine, N6-isopentenyladenosine, 1-methyladenosine, 1-methylpseudouridine, 1-methylguanosine, 1-methylinosine, “2,2-dimethylguanosine”, 2-methyladenosine, 2-methylguanosine, 3-methylcytidine, 5-methylcytidine, N6-methyladenosine, 7-methylguanosine, 5-methylaminomethyluridine, 5-methoxyaminomethyl-2-thiouridine, “beta, D-mannosylquenosine”, 5-methoxycarbonylmethyl-2-thiouridine, 5-methoxycarbonylmethyluridine, 5-methoxyuridine, 2-methylthio-N6-isopentenyladenosine, N-((9-beta-D-ribofuranosyl-2-methylthiopurine-6-yl)carbamoyl)threonine, N-((9-beta-D-ribofuranosylpurine-6-y)N-methylcarbamoyl)threonine, uridine-5-oxyacetic acid-methylester, uridine-5-oxyacetic acid, wybutoxosine, queuosine, 2-thiocytidine, 5-methyl-2-thiouridine, 2-thiouridine, 4-thiouridine, 5-methyluridine, N-((9-beta-D-ribofuranosylpurine-6-yl)-carbamoyl)threonine, 2′-O-methyl-5-methyluridine, 2′-O-methyluridine, wybutosine, “3-(3-amino-3-carboxy-propyl)uridine, (acp3)u”, 2′-0-methyl (M), 3′-phosphorothioate (MS), 3′-thioPACE (MSP), pseudouridine, or 1-methyl pseudo-uridine. Each possibility represents a separate embodiment of the present invention.

### Guide Sequences which Specifically Target a Mutant Allele

[0099] Utilizing a 24 base pair target window for targeting a imitation in a gene would require hundreds of thousands of guide sequences. Any given guide sequence when utilized to target a sequence may result in degradation of the guide sequence, limited activity, no activity, or off-target effects. Accordingly, suitable guide sequences are necessary for targeting a given gene. By the present invention, a novel set of guide sequences have been identified for repairing/correcting/modifying a mutant allele or two mutant alleles of ADA2 gene to express a functional ADA2 protein and treat DADA2.

[0100] The present disclosure provides guide sequences capable of specifically targeting a first mutant allele while leaving a second mutant allele unmodified. The guide sequences of the present invention are designed to, and are most likely to, specifically differentiate between a first mutant allele and a second mutant allele. Of all possible guide sequences which target a first mutant allele desired to be edited/corrected/modified/repaired, the specific guide sequences disclosed herein are specifically effective to function with the disclosed embodiments.

[0101] The present disclosure also provides guide sequences capable of specifically targeting a first and a second mutant alleles. Of all possible guide sequences which target the first and second mutant alleles desired to be edited/corrected/modified/repaired, the specific guide sequences disclosed herein are specifically effective to function with the disclosed embodiments.

[0102] Briefly, the guide sequences may have properties as follows: target a mutant allele using an RNA molecule which targets a founder or common pathogenic mutations for the disease/gene

[0103] Guide sequences of the present invention also may target: (1) have a guanine-cytosine content of greater than 30% and less than 85%; (2) have no repeat of 4 or more thymine/uracil or 8 or more guanine, cytosine, or adenine; (3) having no off-target identified by off-target analysis.

[0104] Guide sequences of the present invention may satisfy any one of the above criteria and are most likely to differentiate between a mutant allele from its corresponding functional allele.

### Examples of RNA Guide Sequences which Specifically Target Mutant Allele or Alleles of ADA2 Gene

[0105] Although a large number of guide sequences can be designed to target a mutant allele, the nucleotide sequences described in SEQ ID NOs: 1-12655 were specifically selected to effectively implement the methods set forth herein and to effectively discriminate between alleles.

[0106] The nucleotide sequences described in SEQ ID NOs: 1-12655 are guide sequences designed for use as described in the embodiments above to associate with sequences of a mutated ADA2 allele. Each engineered guide molecule is further designed such as to associate with a target genomic DNA sequence of interest that lies next to a protospacer adjacent motif (PAM), e.g., a PAM matching the sequence NGG or NAG, where “N” is any nucleobase. The guide sequences were designed to work in conjunction with one or more different CRISPR nucleases, including, but not limited to, e.g. SpCas9WT (PAM SEQ: NGG), SpCas9.VQR.1 (PAM SEQ: NGAN), SpCas9.VQR.2 (PAM SEQ: NGNG), SpCas9.EQR (PAM SEQ: NGAG), SpCas9.VRER (PAM SEQ: NGCG), SaCas9WT (PAM SEQ: NNGRRT), NmCas9WT (PAM SEQ: NNNNGATT), Cpf1 (PAM SEQ: TTTV), or JeCas9WT (PAM SEQ: NNNVRYM). RNA molecules of the present invention are each designed to form complexes in conjunction with one or more different CRISPR nucleases and designed to target polynucleotide sequences of interest utilizing one or more different PAM sequences respective to the CRISPR nuclease utilized.

[0107] In some embodiments the RNA molecule targets an ADA2 gene mutation as shown in Table 1 below. The ADA2 gene mutation details are indicated in the 1^{st} column. Columns 2-4 describe the sequences of guides targeting these mutations by reference to a SEQ ID NO in the Sequence Listing.

TABLE 1
ADA2 gene mutations and sequences of guides targeting these mutations

| | SEQ ID NOs | SEQ ID NOs | SEQ ID NOs |
|---|---|---|---|
| | of 20 | of 21 | of 22 |
| Mutation | base guides | base guides | base guides |
| 22:17181488_T_G | 1-46 | 47-94 | 95-144 |
| 22:17181518_A_G | 145-190 | 191-238 | 239-288 |
| 22:17181552_C_G | 289-334 | 335-382 | 383-432 |
| 22:17181554_C_G | 292, 300, | 341, 360, | 389, 396, |
| | 313, 319, | 362, 367, | 410-411, |
| | 433-474 | 475-518 | 519-564 |
| 22:17181814_A_G | 565-610 | 611-658 | 659-708 |
| 22:17181839_G_T | 709-754 | 755-802 | 803-852 |
| 22:17181877_A_G | 853-898 | 899-946 | 947-996 |
| 22:17181889_A_T | 997-1042 | 1043-1090 | 1091-1140 |
| 22:17181904_T_C | 1141-1186 | 1187-1234 | 1235-1284 |
| 22:17181909_C_G | 1285-1330 | 1331-1378 | 1379-1428 |
| 22:17181914_C_A | 1429-1474 | 1475-1522 | 1523-1572 |
| 22:17181993_G_C | 1573-1618 | 1619-1666 | 1667-1716 |
| 22:17182620_C_T | 1717-1762 | 1763-1810 | 1811-1860 |
| 22:17182671_T_C | 1861-1906 | 1907-1954 | 1955-2004 |
| 22:17182696_C_T | 2005-2050 | 2051-2098 | 2099-2148 |
| 22:17182725_T_A | 2149-2194 | 2195-2242 | 2243-2292 |
| 22:17182733_G_T | 2293-2338 | 2339-2386 | 2387-2436 |
| 22:17183873_CT_C | 2437-2482 | 2483-2530 | 2531-2580 |
| 22:17188342_T_C | 2581-2626 | 2627-2674 | 2675-2724 |
| 22:17188348_C_T | 2725-2770 | 2771-2818 | 2819-2868 |
| 22:17188351_C_T | 2728, 2740, | 2771, 2785, | 2833, 2854, |
| | 2869-2912 | 2913-2958 | 2959-3006 |
| 22:17188357_A_G | 3007-3052 | 3053-3100 | 3101-3150 |
| 22:17188375_C_T | 3151-3196 | 3197-3244 | 3245-3294, |
| 22:17188389_G_A | 3295-3340 | 3341-3388 | 3389-3438 |
| 22:17188402_C_A | 3439-3484 | 3485-3532 | 3533-3582 |
| 22:17188413_T_C | 3583-3628 | 3629-3676 | 3677-3726 |
| 22:17188415_ATG_ACA | 3590, 3619, | 3637, 3654, | 3703, 3709, |
| | 3727-3770 | 3771-3816 | 3817-3864 |
| 22:17188416_TG_CA | 3619, | 3637, | 3703, |
| | 3727-3756, | 3771-3800, | 3817-3848, |
| | 3758-3770, | 3802-3816, | 3850-3864, |
| | 3865-3866 | 3867-3868 | 3869-3870 |
| 22:17188436_C_G | 3871-3916 | 3917-3964 | 3965-4014 |
| 22:17188438_C_T | 3878, 3888, | 3924, 3929, | 3978, 3982, |
| | 3909, 3911, | 3933, 3957, | 4003, 4006, |
| | 4015-4056 | 4057-4100 | 4101-4146 |
| 22:17188448_C_T | 4147-4192 | 4193-4240 | 4241-4290 |
| 22:17188449_T_C | 4156, 4160, | 4206, 4212, | 4257, 4262, |
| | 4164, 4173, | 4220, 4222, | 4272, 4276, |
| | 4175, 4182, | 4230, 4237, | 4280, 4287, |
| | 4291-4330 | 4331-4372 | 4373-4416 |
| 22:17189939_T_C | 4417-4462 | 4463-4510 | 4511-4560 |
| 22:17189952_C_T | 4561-4606 | 4607-4654 | 4655-4704 |
| 22:17189964_G_A | 4705-4750 | 4751-4798 | 4799-4848 |
| 22:17189979_C_G | 4849-4894 | 4895-4942 | 4943-4992 |
| 22:17189982_A_C | 4860, 4864, | 4897, 4911, | 4952, 4982, |
| | 4993-5036 | 5037-5082 | 5083-5130 |
| 22:17189987_C_T | 5131-5176 | 5177-5224 | 5225-5274 |
| 22:17189998_G_A | 5275-5320 | 5321-5368 | 5369-5418 |
| 22:17190034_T_C | 5419-5464 | 5465-5512 | 5513-5562 |
| 22:17191692_G_A | 5563-5608 | 5609-5656 | 5657-5706 |
| 22:17191773_C_G | 5707-5752 | 5753-5800 | 5801-5850 |
| 22:17191780_C_T | 5851-5896 | 5897-5944 | 5945-5994 |
| 22:17191781_GTC_GGG | 5851, | 5897, 5926, | 5978-5979, |
| | 5859-5860, | 5931, 5934, | 5982, 5989, |
| | 5886, | 6037-6080 | 6081-6126 |
| | 5995-6036 | | |
| 22:17203563_C_T | 6127-6172 | 6173-6220 | 6221-6270 |
| 22:17203564_G_A | 6129, 6133, | 6174, 6176, | 6221-6222, |
| | 6140, | 6180, 6187, | 6235, 6249, |
| | 6152-6153, | 6200, 6212, | 6261, 6269, |
| | 6157, | 6311-6352 | 6353-6396 |
| | 6271-6310 | | |
| 22:17203570_A_G | 6397-6442 | 6443-6490 | 6491-6540 |
| 22:17203576_G_A | 6541-6586 | 6587-6634 | 6635-6684 |
| 22:17203587_C_T | 6685-6730 | 6731-6778 | 6779-6828 |
| 22:17203588_A_C | 6688, 6690, | 6734, 6742, | 6796, 6799, |
| | 6696, 6700, | 6750, 6760, | 6809, 6815, |
| | 6712, 6722, | 6766, 6770, | 6819, 6822, |
| | 6829-6868 | 6869-6910 | 6911-6954 |
| 22:17203604_C_T | 6955-7000 | 7001-7048 | 7049-7098 |
| 22:17203607_CGTA_C | 6700, 6974, | 6746, 7041, | 7057, |
| | 7099-7142 | 7143-7188 | 7189-7237 |
| 22:17203628_G_A | 7238-7283 | 7284-7331 | 7332-7381 |
| 22:17203651_GGTGC_G | 7382-7427 | 7298, | 7333, 7347, |
| | | 7428-7474 | 7475-7522 |
| 22:17203655_CGTA_C | 7385, 7395, | 7431, 7433, | 7476, 7481, |
| | 7400, 7410, | 7435, 7457, | 7487, 7505, |
| | 7523-7564 | 7565-7608 | 7609-7654 |
| 22:17203738_G_A | 7655-7700 | 7701-7748 | 7749-7798 |
| 22:17203753_A_G | 7799-7844 | 7845-7892 | 7893-7942 |
| 22:17207070_C_T | 7943-7988 | 7989-8036 | 8037-8086 |
| 22:17207080_A_G | 8087-8132 | 8133-8180 | 8181-8230 |
| 22:17207107_C_T | 8231-8276 | 8277-8324 | 8325-8374 |
| 22:17207152_C_T | 8375-8420 | 8421-8468 | 8469-8518 |
| 22:17207179_T_G | 8519-8564 | 8565-8612 | 8613-8662 |
| 22:17207185_A_C | 8663-8708 | 8709-8756 | 8757-8806 |
| 22:17207219_GC_G | 8807-8852 | 8853-8900 | 8901-8950 |
| 22:17207225_A_G | 8951-8996 | 8997-9044 | 9045-9094 |
| 22:17207236_C_T | 9095-9140 | 9141-9188 | 9189-9238 |
| 22:17207251_A_G | 9239-9284 | 9285-9332 | 9333-9382 |
| 22:17207254_G_A | 9255, 9259, | 9285, 9323, | 9360-9361, |
| | 9383-9426 | 9427-9472 | 9473-9520 |
| 22:17207277_G_C | 9521-9566 | 9567-9614 | 9615-9664 |
| 22:17207287_G_T | 9665-9710 | 9711-9758 | 9759-9808 |
| 22:17209400_A_G | 9809-9854 | 9855-9902 | 9903-9952 |
| 22:17209484_G_A | 9953-9998 | 9999-10046 | 10047-10096 |
| 22:17209492_C_A | 10097-10142 | 10143-10190 | 10191-10240 |
| 22:17209512_CCTT_C | 10241-10286 | 10287-10334 | 10335-10383 |
| 22:17209531_CCG_CGC | 10384-10403 | 10404-10423 | 10424-10443 |
| 22:17209533_GCCCCCCC_G | 10386, 10388, | 10405, 10409, | 10425, 10429, |
| | 10400, | 10420, | 10440, |
| | 10444-10486 | 10487-10531 | 10532-10578 |
| 22:17209533_GC_G | 10271, | 10319-10322, | 10369-10371, |
| | 10273-10275, | 10404-10405, | 10424-10425, |
| | 10384, 10386, | 10409, 10420, | 10429, 10440, |
| | 10388, 10400, | 10504, 10508, | 10549, 10568, |
| | 10464, 10486, | 10615-10652 | 10653-10693 |
| | 10579-10614 | | |
| 22:17209533_G_A | 10384, 10386, | 10404-10405, | 10424-10425, |
| | 10388, 10400, | 10409, 10420, | 10429, 10440, |
| | 10464, | 10504, 10615, | 10568, 10657, |
| | 10579-10580, | 10632, | 10672, |
| | 10694-10706 | 10707-10719 | 10720-10732 |
| 22:17209533_G_C | 10384, 10386, | 10404-10405, | 10424-10425, |
| | 10388, 10400, | 10409, 10420, | 10429, 10440, |
| | 10464, | 10504, 10615, | 10568, 10657, |
| | 10579-10580, | 10632, | 10672, |
| | 10733-10739 | 10740-10746 | 10747-10753 |
| 22:17209535_C_T | 10386, 10464, | 10420, 10504, | 10429, 10549, |
| | 10486, | 10508, 10615, | 10568, 10654, |
| | 10579-10580, | 10618, 10632, | 10657, |
| | 10595, 10612, | 10652, | 10671-10672, |
| | 10754-10792 | 10793-10833 | 10834-10876 |
| 22:17209538_C_A | 10445, 10466, | 10510, 10524, | 10570, 10577, |
| | 10605-10606, | 10642-10643, | 10671, 10683, |
| | 10612-10613, | 10649, 10652, | 10690, 10693, |
| | 10756, | 10794, | 10835, |
| | 10877-10915 | 10916-10956 | 10957-10999 |
| 22:17209538_C_G | 10445, 10466, | 10510, 10524, | 10570, 10577, |
| | 10605-10606, | 10642-10643, | 10671, 10683, |
| | 10612-10613, | 10649, 10652, | 10690, 10693, |
| | 10756, 10879, | 10794, 10917, | 10835, 10981, |
| | 11000-11037 | 11038-11077 | 11078-11119 |
| 22:17209539_C_A | 10445, 10466, | 10510, 10524, | 10566, 10570, |
| | 10479, | 10530, | 10577, |
| | 10605-10607, | 10642-10643, | 10683-10684, |
| | 10613, 10879, | 10649-10650, | 10690, 10693, |
| | 11120-11157 | 10917, | 10981, |
| | | 11158-11197 | 11198-11239 |
| 22:17209539_C_T | 10445, 10466, | 10510, 10524, | 10566, 10570, |
| | 10479, | 10530, | 10577, |
| | 10605-10607, | 10642-10643, | 10683-10684, |
| | 10613, 10879, | 10649-10650, | 10690, |
| | 11240-11277 | 10917, | 10693, 10981, |
| | | 11278-11317 | 11318-11359 |
| 22:17209563_AC_A | 11360-11405 | 11406-11453 | 11454-11503 |
| 22:17209574_G_A | 11504-11549 | 11550-11597 | 11598-11647 |
| 22:17209578_G_A | 11648-11693 | 11694-11741 | 11742-11791 |
| 22:17209595_A_G | 11792-11837 | 11838-11885 | 11886-11935 |
| 22:17209599_C_A | 11936-11981 | 11982-12029 | 12030-12079 |
| 22:17209605_C_A | 12080-12125 | 12126-12173 | 12174-12223 |
| 22:17209652_C_T | 12224-12269 | 12270-12317 | 12318-12367 |
| 22:17209676_A_G | 12368-12413 | 12414-12461 | 12462-12511 |
| 22:17209684_G_C | 12512-12557 | 12558-12605 | 12606-12655 |

[0108] Strategies for HDR repair of a pathogenic mutation associated with DADA2 may involve a guide sequence targeting the pathogenic mutation itself to mediate a DSB in proximity to the mutation. The strategies may further include a sequence repair/correction step by utilizing a donor/template sequence that (e.g., a single-stranded donor oligonucleotides (ssODN), double-stranded Donor (PCR product), Minicircle or virus (rAAV or Lentivirus)).

[0109] In an exemplary strategy, a mutant allele bearing a founder mutation such as, rs202134424 (c.139G>A, p.Gly47Arg), rs200930463 (c.140G>C, p.Gly47Ala), rs77563738 (c.506G>A, p.Arg169Gln), rs376785840 (c.1358A>G, p.Tyr453Cys), rs148936893 (c. 752C>T, p.Pro251Leu), rs775440641 (c,1078A>G, p.Thr360Ala) or any other mutations as indicated in table 1, is targeted by guide sequences designed to target the founder mutation itself such as guide sequences comprising a nucleotide sequence as set forth in SEQ ID Nos: 1-12655.

### Delivery to Cells

[0110] The RNA molecule compositions described herein may be delivered to a target cell by any suitable means. RNA molecule compositions of the present invention may be targeted to any cell which contains and/or expresses a mutated allele, including any mammalian or plant cell. For example, in one embodiment the RNA molecule specifically targets a mutated ADA2 allele and the target cell is an HSC. The delivery to the cell may be performed in-vitro, ex-vivo, or in-vivo. Further, the nucleic acid compositions described herein may be delivered as one or more of DNA molecules, RNA molecules, Ribonucleoproteins (RNP), nucleic acid vectors, or any combination thereof.

[0111] In some embodiments, the RNA molecule comprises a chemical modification. Non-limiting examples of suitable chemical modifications include 2′-0-methyl (M), 2′-0-methyl, 3′phosphorothioate (MS) or 2′-0-methyl, 3′ thioPACE (MSP), pseudouridine, and 1-methyl pseudo-uridine. Each possibility represents a separate embodiment of the present invention.

[0112] Any suitable viral vector system may be used to deliver nucleic acid compositions e.g., the RNA molecule compositions of the subject invention. Conventional viral and non-viral based gene transfer methods can be used to introduce nucleic acids and target tissues. In certain embodiments, nucleic acids are administered for in vivo or ex vivo gene therapy uses. Non-viral vector delivery systems include naked nucleic acid, and nucleic acid complexed with a delivery vehicle such as a liposome or poloxamer. For a review of gene therapy procedures, see Anderson (1992) Science 256:808-813; Nabel & Felgner (1993) TIBTECH 11:211-217; Mitani & Caskey (1993) TIBTECH 11:162-166; Dillon (1993) TIBTECH 11:167-175; Miller (1992) Nature 357:455-460; Van Brunt (1988) Biotechnology 6(10):1149-1154; Vigne (1995) Restorative Neurology and Neuroscience 8:35-36; Kremer & Perricaudet (1995) British Medical Bulletin 51(1):31-44; Haddada et al, (1995) in Current Topics in Microbiology and immunology Doerfler and Bohm (eds.); and Yu et al. (1994) Gene Therapy 1:13-26.

[0113] Methods of non-viral delivery of nucleic acids and/or proteins include electroporation, lipofection, microinjection, biolistics, particle gun acceleration, virosomes, liposomes, immunoliposomes, lipid nanoparticles (LNPs), polycation or lipid:nucleic acid conjugates, artificial virions, and agent-enhanced uptake of nucleic acids or can be delivered to plant cells by bacteria or viruses (e.g., Agrobacterium, Rhizobium sp. NGR234, Sinorhizoboium meliloti, Mesorhizobium loti, tobacco mosaic virus, potato virus X, cauliflower mosaic virus and cassava vein mosaic virus). (See, e.g., Chung et al. (2006) Trends Plant Sci. 11(1):1-4). Sonoporation using, e.g., the Sonitron 2000 system (Rich-Mar), can also be used for delivery of nucleic acids. Cationic-lipid mediated delivery of proteins and/or nucleic acids is also contemplated as an in vivo or in vitro delivery method. (See Zuris et al. (2015) Nat. Biotechnol. 33(1):73-80; see also Coelho et al. (2013) N. Engl. J. Med. 369, 819-829; Judge et al. (2006) Mol. Ther. 13, 494-505; and Basha et al. (2011) Mol. Ther. 19, 2186-2200).

[0114] Additional exemplary nucleic acid delivery systems include those provided by Amaxa® Biosystems (Cologne, Germany), Maxcyte, Inc. (Rockville, Md.), BTX Molecular Delivery Systems (Holliston, Mass.) and Copernicus Therapeutics Inc., (see, e.g., U.S. Pat. No. 6,008,336). Lipofection is described in e.g., U.S. Pat. Nos. 5,049,386, 4,946,787; and 4,897,355, and lipofection reagents are sold commercially (e.g., Transfectam™, Lipofectin™ and Lipofectamine™ RNAiMAX). Cationic and neutral lipids that are suitable for efficient receptor-recognition lipofection of polynucleotides include those of Feigner, WO 91/17424, WO 91/16024. Delivery can be to cells (ex vivo administration) or target tissues (in vivo administration).

[0115] The preparation of lipid:nucleic acid complexes, including targeted liposomes such as immunolipid complexes, is well known to one of skill in the art (See, e.g., Crystal (1995) Science 270: 404-410; Blaese et al. (1995) Cancer Gene Ther. 2:291-297; Behr et al. (1994) Bioconjugate Chem. 5:382-389; Remy et al. (1994) Bioconjugate Chem. 5:647-654; Gao et al. (1995) Gene Therapy 2:710-722; Ahmad et al. (1992) Cancer Res. 52:4817-4820; U.S. Pat. Nos. 4,186,183, 4,217,344, 4;235,871, 4,261,975, 4,485,054, 4,501,728, 4,774,085, 4,837,028, and 4,946,787).

[0116] Additional methods of delivery include the use of packaging the nucleic acids to be delivered into EnGeneIC delivery vehicles (EDVs). These EDVs are specifically delivered to target tissues using bispecific antibodies where one arm of the antibody has specificity for the target tissue and the other has specificity for the EDV. The antibody brings the EDVs to the target cell surface and then the EDV is brought into the cell by endocytosis. Once in the cell, the contents are released (See MacDiarmid et al (2009) Nature Biotechnology 27(7):643).

[0117] The use of RNA or DNA viral based systems for viral mediated delivery of nucleic acids take advantage of highly evolved processes for targeting a virus to specific cells in the body and trafficking the viral payload to the nucleus. Viral vectors can be administered directly to patients (in vivo) or they can be used to treat cells in vitro and the modified cells are administered to patients (ex vivo). Conventional viral based systems for the delivery of nucleic acids include, but are not limited to, retroviral, lentivirus, adenoviral, adeno-associated, vaccinia and herpes simplex virus vectors for gene transfer.

[0118] The tropism of a retrovirus can be altered by incorporating foreign envelope proteins, expanding the potential target population of target cells. Lentiviral vectors are retroviral vectors that are able to transduce or infect non-dividing cells and typically produce high viral titers. Selection of a retroviral gene transfer system depends on the target tissue. Retroviral vectors are comprised of cis-acting long terminal repeats with packaging capacity for up to 6-10 kb of foreign sequence. The minimum cis-acting LTRs are sufficient for replication and packaging of the vectors, which are then used to integrate the therapeutic gene into the target cell to provide permanent transgene expression. Widely used retroviral vectors include those based upon murine leukemia virus (MuLV), gibbon ape leukemia virus (GaLV), Simian Immunodeficiency virus (SIV), human immunodeficiency virus (HIV), and combinations thereof (See, e.g., Buchschacher et al. (1992) J. Virol. 66:2731-2739; Johann et al. (1992) J. Virol. 66:1635-1640; Sommerfelt et al. (1990) Virol. 176:38-59; Wilson et al. (1989) J. Virol. 63:2374-2378; Miller et al. (1991) J. Virol. 65:2220-2224: PCT/US94/05700).

[0119] At least six viral vector approaches are currently available for gene transfer in clinical trials, which utilize approaches that involve complementation of defective vectors by genes inserted into helper cell lines to generate the transducing agent.

[0120] pLASN and MFG-S are examples of retroviral vectors that have been used in clinical trials (Dunbar et al. (1995) Blood 85:3048-305; Kohn et al. (1995) Nat. Med. 1:1017-102; Malech et al. (1997) PNAS 94:22 12133-12138). PA317/pLASN was the first therapeutic vector used in a gene therapy trial. (Blaese et al. (1995). Transduction efficiencies of 50% or greater have been observed for MFG-S packaged vectors. (Ellem et al. (1997) Immunol immunother. 44(1):10-20; Dranoff et al. (1997) Hum. Gene Ther. 1:111-2).

[0121] Packaging cells are used to form virus particles that are capable of infecting a host cell. Such cells include 293 cells, which package adenovirus, AAV, and Psi-2 cells or PA317 cells, which package retrovirus. Viral vectors used in gene therapy are usually generated by a producer cell line that packages a nucleic acid vector into a viral particle. The vectors typically contain the minimal viral sequences required for packaging and subsequent integration into a host (if applicable), other viral sequences being replaced by an expression cassette encoding the protein to be expressed. The missing viral functions are supplied in trans by the packaging cell line. For example, AAV vectors used in gene therapy typically only possess inverted terminal repeat (ITR) sequences from the AAV genome which are required for packaging and integration into the host genome. Viral DNA is packaged in a cell line, which contains a helper plasmid encoding the other AAV genes, namely rep and cap, but lacking ITR sequences. The cell line is also infected with adenovirus as a helper. The helper virus promotes replication of the AAV vector and expression of AAV genes from the helper plasmid. The helper plasmid is not packaged in significant amounts due to a lack of ITR sequences. Contamination with adenovirus can be reduced by, e.g., heat treatment to which adenovirus is more sensitive than AAV. Additionally, AAV can be produced at clinical scale using baculovirus systems (see U.S. Pat. No. 7,479,5541.

[0122] In many gene therapy applications, it is desirable that the gene therapy vector be delivered with a high degree of specificity to a particular tissue type. Accordingly, a viral vector can be modified to have specificity for a given cell type by expressing a ligand as a fusion protein with a viral coat protein on the outer surface of the virus. The ligand is chosen to have affinity for a receptor known to be present on the cell type of interest. For example, Han et al. (1995) Proc. Natl. Acad. Sci. USA 92:9747-9751, reported that Moloney murine leukemia virus can be modified to express human heregulin fused to gp70, and the recombinant virus infects certain human breast cancer cells expressing human epidermal growth factor receptor. This principle can be extended to other virus-target cell pairs, in which the target cell expresses a receptor and the virus expresses a fusion protein comprising a ligand for the cell-surface receptor. For example, filamentous phage can be engineered to display antibody fragments (e.g., FAB or Fv) having specific binding affinity for virtually any chosen cellular receptor. Although the above description applies primarily to viral vectors, the same principles can be applied to nonviral vectors. Such vectors can be engineered to contain specific uptake sequences which favor uptake by specific target cells.

[0123] Gene therapy vectors can be delivered in vivo by administration to an individual patient, typically by systemic administration (e.g., intravitreal, intravenous, intraperitoneal, intramuscular, subdermal, or intracranial infusion) or topical application, as described below. Alternatively, vectors can be delivered to cells ex vivo, such as cells explanted from an individual patient (e.g., lymphocytes, bone marrow aspirates, tissue biopsy) or universal donor hematopoietic stem cells, followed by reimplantation of the cells into a patient, usually after selection for cells which have incorporated the vector.

[0124] Ex vivo cell transfection for diagnostics, research, or for gene therapy (e.g., via re-infusion of the transfected cells into the host organism) is well known to those of skill in the art. In a preferred embodiment, cells are isolated from the subject organism, transfected with a nucleic acid composition, and re-infused back into the subject organism (e.g., patient). Various cell types suitable for ex vivo transfection are well known to those of skill in the art (See, e.g., Freshney et al. (1994) Culture of Animal Cells, A Manual of Basic Technique, 3rd ed, and the references cited therein for a discussion of how to isolate and culture cells from patients).

[0125] Suitable cells include, but are not limited to, eukaryotic cells and/or cell lines. Non-limiting examples of such cells or cell lines generated from such cells include COS, CHO (e.g., CHO-S, CHO-K1, CHO-DG44, CHO-DUXB11, CHO-DUKX, CHOK1SV), VERO, MDCK, WI38, V79, B14AF28-G3, BHK, HaK, NSO, SP2/0-Ag14, HeLa, HEK293 (e.g., HEK293-F, HEK293-H, HEK293-T), perC6 cells, any plant cell (differentiated or undifferentiated), as well as insect cells such as Spodopterafugiperda (Sf), or fungal cells such as Saccharomyces, Pichia and Schizosaccharomyces. In certain embodiments, the cell line is a CHO-K1, MDCK or HEK293 cell line. Additionally, primary cells may be isolated and used ex vivo for reintroduction into the subject to be treated following treatment with a guided nuclease system (e.g. CRISPR/Cas). Suitable primary cells include peripheral blood mononuclear cells (PBMC), and other blood cell subsets such as, but not limited to, CD4+ T cells or CD8+ T cells. Suitable cells also include stem cells such as, by way of example, embryonic stem cells, induced pluripotent stem cells, hematopoietic stem cells (CD34+), neuronal stem cells and mesenchymal stem cells.

[0126] In one embodiment, stem cells are used in ex vivo procedures for cell transfection and gene therapy. The advantage to using stem cells is that they can be differentiated into other cell types in vitro, or can be introduced into a mammal (such as the donor of the cells) where they will engraft in the bone marrow. Methods for differentiating CD34+ cells in vitro into clinically important immune cell types using cytokines such a GM-CSF, IFN-gamma, and TNF-alpha are known (as a non-limiting example see, Inaba et al., J. Exp. Med. 176:1693-1702 (1992)).

[0127] Stem cells are isolated for transduction and differentiation using known methods. For example, stem cells are isolated from bone marrow cells by panning the bone marrow cells with antibodies which bind unwanted cells, such as CD4+ and CD8+ (T cells), CD45+ (panB cells), GR-1 (granulocytes), and Iad (differentiated antigen presenting cells) (as a non-limiting example see Inaba et al. (1992) Exp. Med. 176:1693-1702). Stem cells that have been modified may also be used in some embodiments.

[0128] Any one of the RNA molecule compositions described herein is suitable for genome editing in either mitotic cells or post-mitotic cells or any cell which is not actively dividing, e.g., arrested cells.

[0129] Vectors (e.g., retroviruses, liposomes, etc.) containing therapeutic nucleic acid compositions can also be administered directly to an organism for transduction of cells in vivo. Administration is by any of the routes normally used for introducing a molecule into ultimate contact with blood or tissue cells including, but not limited to, injection, infusion, topical application (e.g., eye drops and cream) and electroporation. Suitable methods of administering such nucleic acids are available and well known to those of skill in the art, and, although more than one route can be used to administer a particular composition, a particular route can often provide a more immediate and more effective reaction than another route.

[0130] Vectors suitable for introduction of transgenes into immune cells (e.g., T-cells) include non-integrating lentivirus vectors. See, e.g., U.S. Patent Publication No. 2009-0117617.

[0131] Pharmaceutically acceptable carriers are determined in part by the particular composition being administered, as well as by the particular method used to administer the composition. Accordingly, there is a wide variety of suitable formulations of pharmaceutical compositions available, as described below (See, e.g., Remington's Pharmaceutical Sciences, 17th ed., 1989).

[0132] In accordance with some embodiments, there is provided an RNA molecule which binds to/associates with and/or directs the RNA guided DNA nuclease (E. G., CRISPR nuclease) to a sequence comprising a mutation in one or both alleles of a gene of interest

[0133] The disclosed compositions and methods may also be used in the manufacture of a medicament for treating dominant genetic disorders in a patient.

### DNA Repair by Homologous Recombination

[0134] The term “homology-directed repair” or “HDR” refers to a mechanism for repairing DNA damage in cells, for example, during repair of double-stranded and single-stranded breaks in DNA. HDR requires nucleotide sequence homology and uses a “nucleic acid template” (nucleic acid template or donor template used interchangeably herein) to repair the sequence where the double-stranded or single break occurred (e.g., DNA target sequence). This results in the transfer of genetic information from, for example, the nucleic acid template to the DNA target sequence. HDR may result in alteration of the DNA target sequence (e.g., insertion, deletion, mutation) if the nucleic acid template sequence differs from the DNA target sequence and part or all of the nucleic acid template polynucleotide or oligonucleotide is incorporated into the DNA target sequence. In some embodiments, an entire nucleic acid template polynucleotide, a portion of the nucleic acid template polynucleotide, or a copy of the nucleic acid template is integrated at the site of the DNA target sequence.

[0135] The terms “nucleic acid template” and “donor”, refer to a nucleotide sequence that is inserted or copied into a genome. The nucleic acid template comprises a nucleotide sequence, e.g., of one or more nucleotides, that will be added to or will template a change in the target nucleic acid or may be used to modify the target sequence. A nucleic acid template sequence may be of any length, for example between 2 and 10,000 nucleotides in length (or any integer value there between or there above), preferably between about 100 and 1000 nucleotides in length (or any integer there between), more preferably between about 200 and 500 nucleotides in length. A nucleic acid template may be a single stranded nucleic acid, a double stranded nucleic acid. In some embodiment, the nucleic acid template comprises a nucleotide sequence, e.g., of one or more nucleotides, that corresponds to wild type sequence of the target nucleic acid, e.g., of the target position. In some embodiment, the nucleic acid template comprises a ribonucleotide sequence, e.g., of one or more ribonucleotides, that corresponds to wild type sequence of the target nucleic acid, e.g., of the target position. In some embodiment, the nucleic acid template comprises modified ribonucleotides.

[0136] Insertion of an exogenous sequence (also called a “donor sequence,” donor template” or “donor”), for example, for correction of a mutant gene or for increased expression of a wild-type gene can also be carried out. It will be readily apparent that the donor sequence is typically not identical to the genomic sequence where it is placed. A donor sequence can contain a non-homologous sequence flanked by two regions of homology to allow for efficient HDR at the location of interest. Additionally, donor sequences can comprise a vector molecule containing sequences that are not homologous to the region of interest in cellular chromatin. A donor molecule can contain several, discontinuous regions of homology to cellular chromatin. For example, for targeted insertion of sequences not normally present in a region of interest, said sequences can be present in a donor nucleic acid molecule and flanked by regions of homology to sequence in the region of interest.

[0137] The donor polynucleotide can be DNA or RNA, single-stranded and/or double-stranded and can be introduced into a cell in linear or circular form. See, e.g., U.S. Patent Publication Nos. 20100047805; 201 10281361; and 20110207221. If introduced in linear form, the ends of the donor sequence can be protected (e.g., from exonucleolytic degradation) by methods known to those of skill in the art. For example, one or more dideoxynucleotide residues are added to the 3′ terminus of a linear molecule and/or self-complementary oligonucleotides are ligated to one or both ends. See, for example, Chang et al. (1987) Proc. Natl. Acad. Sci. USA 84:4959-4963; Nehls et al. (1996) Science 272:886-889. Additional methods for protecting exogenous polynucleotides from degradation include, but are not limited to, addition of terminal amino group(s) and the use of modified internucleotide linkages such as, for example, phosphorothioates, phosphoramidates, and O-methyl ribose or deoxyribose residues.

[0138] Accordingly embodiments of the present invention using a donor DNA template for HDR may use a DNA or RNA, single-stranded and/or double-stranded and can be introduced into a cell in linear or circular form. In an embodiment of the present invention using: (1) an RNA molecule comprising a guide sequence to affect a double strand break in a gene prior to HDR and (2) a donor RNA template for HDR, the RNA molecule comprising the guide sequence is a first RNA molecule and the donor RNA template is a separate RNA molecule. In an embodiment, the RNA molecule comprising the guide sequence also comprises the donor RNA template.

[0139] A donor sequence may also be air oligonucleotide and be used for gene correction or targeted alteration of an endogenous sequence. The oligonucleotide may be introduced to the cell on a vector, may be electroporated into the cell, or may be introduced via other methods known in the art. The oligonucleotide can be used to ‘correct’ a mutated sequence in an endogenous gene (e.g., the sickle mutation in beta globin), or may be used to insert sequences with a desired purpose into an endogenous locus.

[0140] A polynucleotide can be introduced into a cell as part of a vector molecule having additional sequences such as, for example, replication origins, promoters and genes encoding antibiotic resistance. Moreover, donor polynucleotides can be introduced as naked nucleic acid, as nucleic acid complexed with an agent such as a liposome or poloxamer, or can be delivered by viruses (e.g., adenovirus, AAV, herpesvirus, retrovirus, lentivirus and integrase defective lentivirus (IDLV).

[0141] The donor is generally inserted so that its expression is driven by the endogenous promoter at the integration site, namely the promoter that drives expression of the endogenous gene into which the donor is inserted. However, it will be apparent that the donor may comprise a promoter and/or enhancer, for example a constitutive promoter or an inducible or tissue specific promoter.

[0142] The donor molecule may be inserted into an endogenous gene such that all, some or none of the endogenous gene is expressed. For example, a transgene as described herein may be inserted into an endogenous locus such that some (N-terminal and/or C-terminal to the transgene) or none of the endogenous sequences are expressed, for example as a fusion with the transgene. In other embodiments, the transgene (e.g., with or without additional coding sequences such as for the endogenous gene) is integrated into any endogenous locus, for example a safe-harbor locus, for example a CCR5 gene, a CXCR4 gene, a PPP1R12c (also known as AAVS1) gene, an albumin gene or a Rosa gene. See, e.g., U.S. Pat. Nos. 7,951,925 and 8,110,379; U.S. Publication Nos. 20080159996; 201000218264; 20100291048; 20120017290; 20110265198; 20130137104; 20130122591; 20130177983 and 20130177960 and U.S. Provisional Application No. 61/823,689).

[0143] When endogenous sequences (endogenous or part of the transgene) are expressed with the transgene, the endogenous sequences may be full-length sequences (wild-type or mutant) or partial sequences. Preferably the endogenous sequences are functional. Non-limiting examples of the function of these full length or partial sequences include increasing the serum half-life of the polypeptide expressed by the transgene (e.g., therapeutic gene) and/or acting as a carrier.

[0144] Furthermore, although not required for expression, exogenous sequences may also include transcriptional or translational regulatory sequences, for example, promoters, enhancers, insulators, internal ribosome entry sites, sequences encoding 2A peptides and/or polyadenylation signals.

[0145] In certain embodiments, the donor molecule comprises a sequence selected from the group consisting of a gene encoding a protein (e.g., a coding sequence encoding a protein that is lacking in the cell or in the individual or an alternate version of a gene encoding a protein), a regulatory sequence and/or a sequence that encodes a structural nucleic acid such as microRNA or siRNA.

### General

[0146] For the foregoing embodiments, each embodiment disclosed herein is contemplated as being applicable to each of the other disclosed embodiment. For example, it is understood that any of the RNA molecules or compositions of the present invention may be utilized in any of the methods of the present invention.

[0147] As used herein, all headings are simply for organization and are not intended to limit the disclosure in any manner. The content of any individual section may be equally applicable to all sections.

[0148] Additional objects, advantages, and novel features of the present invention will become apparent to one ordinarily skilled in the art upon examination of the following examples, which are not intended to be limiting. Additionally, each of the various embodiments and aspects of the present invention as delineated hereinabove and as claimed in the claims section below finds experimental support in the following examples.

[0149] It is appreciated that certain features of the invention, which are, for clarity, described in the context of separate embodiments, may also be provided in combination in a single embodiment. Conversely, various features of the invention, which are, for brevity, described in the context of a single embodiment, may also be provided separately or in any suitable sub-combination or as suitable in any other described embodiment of the invention. Certain features described in the context of various embodiments are not to be considered essential features of those embodiments, unless the embodiment is inoperative without those elements.

[0150] Generally, the nomenclature used herein, and the laboratory procedures utilized in the present invention include molecular, biochemical, microbiological and recombinant DNA techniques. Such techniques are thoroughly explained in the literature. See, for example, “Molecular Cloning: A laboratory Manual” Sambrook et al., (1989); “Current Protocols in Molecular Biology” Volumes I-III Ausubel, R. M., ed. (1994); Ausubel et al., “Current Protocols in Molecular Biology”, John Wiley and Sons, Baltimore, Md. (1989); Perbal, “A Practical Guide to Molecular Cloning”, John Wiley & Sons, New York (1988); Watson et al., “Recombinant DNA”, Scientific American Books, New York; Birren et al. (eds) “Genome Analysis: A Laboratory Manual Series”, Vols. 1-4, Cold Spring Harbor Laboratory Press, New York (1998); methodologies as set forth in U.S. Pat. Nos. 4,666,828; 4,683,202; 4,801,531; 5,192,659 and 5,272,057; “Cell Biology: A Laboratory Handbook”, Volumes I-III Cellis, J. E., ed. (1994); “Culture of Animal Cells—A Manual of Basic Technique” by Freshney, Wiley-Liss, N.Y. (1994), Third Edition; “Current Protocols in Immunology” Volumes I-III Coligan J. E., ed. (1994); Stites et al. (eds), “Basic and Clinical Immunology” (8th Edition), Appleton & Lange, Norwalk, Conn. (1994); Mishell and Shiigi (eds), “Strategies for Protein Purification and Characterization A Laboratory Course Manual” CSHL Press (1996); “Bacteriophage Methods and Protocols”, Volume 1: Isolation, Characterization, and Interactions, all of which are incorporated by reference. Other general references are provided throughout this document.

[0151] Examples are provided below to facilitate a more complete understanding of the invention. The following examples illustrate the exemplary modes of making and practicing the invention. However, the scope of the invention is not limited to specific embodiments disclosed in these Examples, which are for purposes of illustration only.

### EXPERIMENTAL DETAILS

### Example 1

### ADA2 Correction Analysis

[0152] Guide sequences comprising 17-22 nucleotides in the sequences of 17-22 contiguous nucleotides set forth in SEQ ID NOs: 1-12655 are screened for high on target activity. On target activity is determined by DNA capillary electrophoresis analysis.

[0153] According to DNA capillary electrophoresis analysis, guide sequences comprising 17-22 nucleotides in the sequences of 17-22 contiguous nucleotides set forth in SEQ ID NOs: 1-12655 are found to be suitable for correction of the ADA2 gene.

### Discussion

[0154] The guide sequences of the present invention are determined to be suitable for targeting the ADA2 gene.

### Example 2

### ADA2 Guide Activity Test

[0155] To choose the optimal guides for editing strategies in ADA2 indication, 23 different guides (Table 2), were screened for high on-target activity in HeLa cells, which are homozygous to the WT allele. The guides target mutations in different regions of ADA2, which relevant to the therapeutic editing strategies. Briefly, spCas9 coding plasmid (64 ng) was co-transfected with each of the guide DNA plasmids (20 ng) in 96 well plate format using jetOPTIMUS reagent (Polyplus). Cells were harvested 72 h post DNA transfection. Genomic DNA was extracted and used for capillary electrophoresis using primers amplify the endogenous genomic regions. The graph in FIG. 1 represents the average of % editing±STDV of 3 independent experiments. According to capillary electrophoreses analysis all guides show activity ranging between 5%-80%.

TABLE 2
Sequence of ADA2 guides

| Name | sgRNA | SEQ ID No. |
|---|---|---|
| DADA2-g1 | AAGAAAAGAUGAUGCGGCUG | 10879 |
| DADA2-g2 | AGAAAAGAUGAUGCGGCUGA | 11244 |
| DADA2-g3 | GAAAAGAUGAUGCGGCUGAG | 11263 |
| DADA2-g4 | AAAAGAUGAUGCGGCUGAGG | 11240 |
| DADA2-g5 | AGAUGAUGCGGCUGAGGGGG | 11245 |
| DADA2-g6 | GAUGCGGCUGAGGGGGCGGC | 11266 |
| DADA2-g7 | AGAAAAGAUGAUGCGGCUGG | 10756 |
| DADA2-g8 | GAAAAGAUGAUGCGGCUGGC | 11021 |
| DADA2-g9 | AAAAGAUGAUGCGGCUGGCG | 11000 |
| DADA2-g10 | AGAUGAUGCGGCUGGCGGGG | 11004 |
| DADA2-g11 | GAUGCGGCUGGCGGGGCGGC | 11023 |
| DADA2-g12 | UGCUGGAGGAUUAUCAGAAG | 8270 |
| DADA2-g13 | GCUGGAGGAUUAUCAGAAGC | 8255 |
| DADA2-g14 | GAUCAGAGCCAGGCUGCUGC | 6157 |
| DADA2-g15 | UGGGCUCACCAGCAGCAGCC | 6310 |
| DADA2-g16 | UUCUUCCACGCCGGAGAAGC | 2626 |
| DADA2-g17 | CGGAGAAGCAGGUGAGCCUG | 2601 |
| DADA2-g18 | GGAGAAGCAGGUGAGCCUGC | 2615 |
| DADA2-g19 | CGCAGGCUCACCUGCUUCUC | 2598 |
| DADA2-g20 | GCUCACCUGCUUCUCCGGCG | 2613 |
| DADA2-g21 | CUUGUCCUGUGAUUUCUAUG | 1164 |
| DADA2-g22 | GAAGACCUCAUAGAAAUCAC | 1166 |
| DADA2-g23 | GAAAUCACAGGACAAGCCUU | 1165 |

[0156] Guides characterized with activity lower than 10% according to the capillary electrophoresis were further tested by in vitro cleavage assay with Cas9 RNP and DNA template which contains the relevant mutation.

[0157] In short, in order to assemble RNP, 2 pmol gRNA were incubated with 2 pmol sp Cas9 for 10 min in 25° C. Next, the RNP was incubated for 1 hr in 37° C. with 150 ng dsDNA, PCR product substrate, that contains the relevant mutation. In order to determine activity, the samples were run on 1.7% agarose gel after proteinase K treatment. According to the results, g12 and g16 are active on the mutated template but not active on the WI allele, which suggests that sp Cas9 possess discrimination activity with g12 and g16 (See FIG. 2A and FIG. 2B.).

The application's sequence listing, which the Patent Office published only in electronic form, follows.

SEQUENCE LISTING (12659 sequences)

SEQ ID NO: 1 - RNA, 20 nt, Artificial Sequence
  Synthetic
acacagugaggagaagcuag

SEQ ID NO: 2 - RNA, 20 nt, Artificial Sequence
  Synthetic
acagugaggagaagcuagcc

SEQ ID NO: 3 - RNA, 20 nt, Artificial Sequence
  Synthetic
acuguguagccacaucugcu

SEQ ID NO: 4 - RNA, 20 nt, Artificial Sequence
  Synthetic
agauguggcuacacagugag

SEQ ID NO: 5 - RNA, 20 nt, Artificial Sequence
  Synthetic
agcagauguggcuacacagu

SEQ ID NO: 6 - RNA, 20 nt, Artificial Sequence
  Synthetic
agcuucuccucacuguguag

SEQ ID NO: 7 - RNA, 20 nt, Artificial Sequence
  Synthetic
aguucauagcagauguggcu

SEQ ID NO: 8 - RNA, 20 nt, Artificial Sequence
  Synthetic
auagcagauguggcuacaca

SEQ ID NO: 9 - RNA, 20 nt, Artificial Sequence
  Synthetic
auguggcuacacagugagga

SEQ ID NO: 10 - RNA, 20 nt, Artificial Sequence
  Synthetic
cacagugaggagaagcuagc

SEQ ID NO: 11 - RNA, 20 nt, Artificial Sequence
  Synthetic
cacuguguagccacaucugc

SEQ ID NO: 12 - RNA, 20 nt, Artificial Sequence
  Synthetic
cagauguggcuacacaguga

SEQ ID NO: 13 - RNA, 20 nt, Artificial Sequence
  Synthetic
cauagcagauguggcuacac

SEQ ID NO: 14 - RNA, 20 nt, Artificial Sequence
  Synthetic
ccucacuguguagccacauc

SEQ ID NO: 15 - RNA, 20 nt, Artificial Sequence
  Synthetic
cuacacagugaggagaagcu

SEQ ID NO: 16 - RNA, 20 nt, Artificial Sequence
  Synthetic
cuagcuucuccucacugugu

SEQ ID NO: 17 - RNA, 20 nt, Artificial Sequence
  Synthetic
cucacuguguagccacaucu

SEQ ID NO: 18 - RNA, 20 nt, Artificial Sequence
  Synthetic
cuccucacuguguagccaca

SEQ ID NO: 19 - RNA, 20 nt, Artificial Sequence
  Synthetic
cuggcuagcuucuccucacu

SEQ ID NO: 20 - RNA, 20 nt, Artificial Sequence
  Synthetic
cuguguagccacaucugcua

SEQ ID NO: 21 - RNA, 20 nt, Artificial Sequence
  Synthetic
cuucuccucacuguguagcc

SEQ ID NO: 22 - RNA, 20 nt, Artificial Sequence
  Synthetic
gauguggcuacacagugagg

SEQ ID NO: 23 - RNA, 20 nt, Artificial Sequence
  Synthetic
gcagauguggcuacacagug

SEQ ID NO: 24 - RNA, 20 nt, Artificial Sequence
  Synthetic
gcuacacagugaggagaagc

SEQ ID NO: 25 - RNA, 20 nt, Artificial Sequence
  Synthetic
gcuagcuucuccucacugug

SEQ ID NO: 26 - RNA, 20 nt, Artificial Sequence
  Synthetic
gcuggcuagcuucuccucac

SEQ ID NO: 27 - RNA, 20 nt, Artificial Sequence
  Synthetic
gcuucuccucacuguguagc

SEQ ID NO: 28 - RNA, 20 nt, Artificial Sequence
  Synthetic
ggcuacacagugaggagaag

SEQ ID NO: 29 - RNA, 20 nt, Artificial Sequence
  Synthetic
ggcuagcuucuccucacugu

SEQ ID NO: 30 - RNA, 20 nt, Artificial Sequence
  Synthetic
ggcuggcuagcuucuccuca

SEQ ID NO: 31 - RNA, 20 nt, Artificial Sequence
  Synthetic
gggcuggcuagcuucuccuc

SEQ ID NO: 32 - RNA, 20 nt, Artificial Sequence
  Synthetic
guggcuacacagugaggaga

SEQ ID NO: 33 - RNA, 20 nt, Artificial Sequence
  Synthetic
guucauagcagauguggcua

SEQ ID NO: 34 - RNA, 20 nt, Artificial Sequence
  Synthetic
uacacagugaggagaagcua

SEQ ID NO: 35 - RNA, 20 nt, Artificial Sequence
  Synthetic
uagcagauguggcuacacag

SEQ ID NO: 36 - RNA, 20 nt, Artificial Sequence
  Synthetic
uagcuucuccucacugugua

SEQ ID NO: 37 - RNA, 20 nt, Artificial Sequence
  Synthetic
ucacuguguagccacaucug

SEQ ID NO: 38 - RNA, 20 nt, Artificial Sequence
  Synthetic
ucauagcagauguggcuaca

SEQ ID NO: 39 - RNA, 20 nt, Artificial Sequence
  Synthetic
uccucacuguguagccacau

SEQ ID NO: 40 - RNA, 20 nt, Artificial Sequence
  Synthetic
ucuccucacuguguagccac

SEQ ID NO: 41 - RNA, 20 nt, Artificial Sequence
  Synthetic
uggcuacacagugaggagaa

SEQ ID NO: 42 - RNA, 20 nt, Artificial Sequence
  Synthetic
uggcuagcuucuccucacug

SEQ ID NO: 43 - RNA, 20 nt, Artificial Sequence
  Synthetic
uguggcuacacagugaggag

SEQ ID NO: 44 - RNA, 20 nt, Artificial Sequence
  Synthetic
uguguagccacaucugcuau

SEQ ID NO: 45 - RNA, 20 nt, Artificial Sequence
  Synthetic
uucauagcagauguggcuac

SEQ ID NO: 46 - RNA, 20 nt, Artificial Sequence
  Synthetic
uucuccucacuguguagcca

SEQ ID NO: 47 - RNA, 21 nt, Artificial Sequence
  Synthetic
aaguucauagcagauguggcu

SEQ ID NO: 48 - RNA, 21 nt, Artificial Sequence
  Synthetic
acacagugaggagaagcuagc

SEQ ID NO: 49 - RNA, 21 nt, Artificial Sequence
  Synthetic
acagugaggagaagcuagcca

SEQ ID NO: 50 - RNA, 21 nt, Artificial Sequence
  Synthetic
acuguguagccacaucugcua

SEQ ID NO: 51 - RNA, 21 nt, Artificial Sequence
  Synthetic
agauguggcuacacagugagg

SEQ ID NO: 52 - RNA, 21 nt, Artificial Sequence
  Synthetic
agcagauguggcuacacagug

SEQ ID NO: 53 - RNA, 21 nt, Artificial Sequence
  Synthetic
agcuucuccucacuguguagc

SEQ ID NO: 54 - RNA, 21 nt, Artificial Sequence
  Synthetic
agggcuggcuagcuucuccuc

SEQ ID NO: 55 - RNA, 21 nt, Artificial Sequence
  Synthetic
aguucauagcagauguggcua

SEQ ID NO: 56 - RNA, 21 nt, Artificial Sequence
  Synthetic
auagcagauguggcuacacag

SEQ ID NO: 57 - RNA, 21 nt, Artificial Sequence
  Synthetic
auguggcuacacagugaggag

SEQ ID NO: 58 - RNA, 21 nt, Artificial Sequence
  Synthetic
cacagugaggagaagcuagcc

SEQ ID NO: 59 - RNA, 21 nt, Artificial Sequence
  Synthetic
cacuguguagccacaucugcu

SEQ ID NO: 60 - RNA, 21 nt, Artificial Sequence
  Synthetic
cagauguggcuacacagugag

SEQ ID NO: 61 - RNA, 21 nt, Artificial Sequence
  Synthetic
cauagcagauguggcuacaca

SEQ ID NO: 62 - RNA, 21 nt, Artificial Sequence
  Synthetic
ccucacuguguagccacaucu

SEQ ID NO: 63 - RNA, 21 nt, Artificial Sequence
  Synthetic
cuacacagugaggagaagcua

SEQ ID NO: 64 - RNA, 21 nt, Artificial Sequence
  Synthetic
cuagcuucuccucacugugua

SEQ ID NO: 65 - RNA, 21 nt, Artificial Sequence
  Synthetic
cucacuguguagccacaucug

SEQ ID NO: 66 - RNA, 21 nt, Artificial Sequence
  Synthetic
cuccucacuguguagccacau

SEQ ID NO: 67 - RNA, 21 nt, Artificial Sequence
  Synthetic
cuggcuagcuucuccucacug

SEQ ID NO: 68 - RNA, 21 nt, Artificial Sequence
  Synthetic
cuguguagccacaucugcuau

SEQ ID NO: 69 - RNA, 21 nt, Artificial Sequence
  Synthetic
cuucuccucacuguguagcca

SEQ ID NO: 70 - RNA, 21 nt, Artificial Sequence
  Synthetic
gauguggcuacacagugagga

SEQ ID NO: 71 - RNA, 21 nt, Artificial Sequence
  Synthetic
gcagauguggcuacacaguga

SEQ ID NO: 72 - RNA, 21 nt, Artificial Sequence
  Synthetic
gcuacacagugaggagaagcu

SEQ ID NO: 73 - RNA, 21 nt, Artificial Sequence
  Synthetic
gcuagcuucuccucacugugu

SEQ ID NO: 74 - RNA, 21 nt, Artificial Sequence
  Synthetic
gcuggcuagcuucuccucacu

SEQ ID NO: 75 - RNA, 21 nt, Artificial Sequence
  Synthetic
gcuucuccucacuguguagcc

SEQ ID NO: 76 - RNA, 21 nt, Artificial Sequence
  Synthetic
ggcuacacagugaggagaagc

SEQ ID NO: 77 - RNA, 21 nt, Artificial Sequence
  Synthetic
ggcuagcuucuccucacugug

SEQ ID NO: 78 - RNA, 21 nt, Artificial Sequence
  Synthetic
ggcuggcuagcuucuccucac

SEQ ID NO: 79 - RNA, 21 nt, Artificial Sequence
  Synthetic
gggcuggcuagcuucuccuca

SEQ ID NO: 80 - RNA, 21 nt, Artificial Sequence
  Synthetic
guggcuacacagugaggagaa

SEQ ID NO: 81 - RNA, 21 nt, Artificial Sequence
  Synthetic
guucauagcagauguggcuac

SEQ ID NO: 82 - RNA, 21 nt, Artificial Sequence
  Synthetic
uacacagugaggagaagcuag

SEQ ID NO: 83 - RNA, 21 nt, Artificial Sequence
  Synthetic
uagcagauguggcuacacagu

SEQ ID NO: 84 - RNA, 21 nt, Artificial Sequence
  Synthetic
uagcuucuccucacuguguag

SEQ ID NO: 85 - RNA, 21 nt, Artificial Sequence
  Synthetic
ucacuguguagccacaucugc

SEQ ID NO: 86 - RNA, 21 nt, Artificial Sequence
  Synthetic
ucauagcagauguggcuacac

SEQ ID NO: 87 - RNA, 21 nt, Artificial Sequence
  Synthetic
uccucacuguguagccacauc

SEQ ID NO: 88 - RNA, 21 nt, Artificial Sequence
  Synthetic
ucuccucacuguguagccaca

SEQ ID NO: 89 - RNA, 21 nt, Artificial Sequence
  Synthetic
uggcuacacagugaggagaag

SEQ ID NO: 90 - RNA, 21 nt, Artificial Sequence
  Synthetic
uggcuagcuucuccucacugu

SEQ ID NO: 91 - RNA, 21 nt, Artificial Sequence
  Synthetic
uguggcuacacagugaggaga

SEQ ID NO: 92 - RNA, 21 nt, Artificial Sequence
  Synthetic
uguguagccacaucugcuaug

SEQ ID NO: 93 - RNA, 21 nt, Artificial Sequence
  Synthetic
uucauagcagauguggcuaca

SEQ ID NO: 94 - RNA, 21 nt, Artificial Sequence
  Synthetic
uucuccucacuguguagccac

SEQ ID NO: 95 - RNA, 22 nt, Artificial Sequence
  Synthetic
aaguucauagcagauguggcua

SEQ ID NO: 96 - RNA, 22 nt, Artificial Sequence
  Synthetic
acacagugaggagaagcuagcc

SEQ ID NO: 97 - RNA, 22 nt, Artificial Sequence
  Synthetic
acagugaggagaagcuagccag

SEQ ID NO: 98 - RNA, 22 nt, Artificial Sequence
  Synthetic
acuguguagccacaucugcuau

SEQ ID NO: 99 - RNA, 22 nt, Artificial Sequence
  Synthetic
agauguggcuacacagugagga

SEQ ID NO: 100 - RNA, 22 nt, Artificial Sequence
  Synthetic
agcagauguggcuacacaguga

SEQ ID NO: 101 - RNA, 22 nt, Artificial Sequence
  Synthetic
agcuucuccucacuguguagcc

SEQ ID NO: 102 - RNA, 22 nt, Artificial Sequence
  Synthetic
agggcuggcuagcuucuccuca

SEQ ID NO: 103 - RNA, 22 nt, Artificial Sequence
  Synthetic
aguucauagcagauguggcuac

SEQ ID NO: 104 - RNA, 22 nt, Artificial Sequence
  Synthetic
auagcagauguggcuacacagu

SEQ ID NO: 105 - RNA, 22 nt, Artificial Sequence
  Synthetic
auguggcuacacagugaggaga

SEQ ID NO: 106 - RNA, 22 nt, Artificial Sequence
  Synthetic
cacagugaggagaagcuagcca

SEQ ID NO: 107 - RNA, 22 nt, Artificial Sequence
  Synthetic
cacuguguagccacaucugcua

SEQ ID NO: 108 - RNA, 22 nt, Artificial Sequence
  Synthetic
cagauguggcuacacagugagg

SEQ ID NO: 109 - RNA, 22 nt, Artificial Sequence
  Synthetic
cauagcagauguggcuacacag

SEQ ID NO: 110 - RNA, 22 nt, Artificial Sequence
  Synthetic
ccucacuguguagccacaucug

SEQ ID NO: 111 - RNA, 22 nt, Artificial Sequence
  Synthetic
cuacacagugaggagaagcuag

SEQ ID NO: 112 - RNA, 22 nt, Artificial Sequence
  Synthetic
cuagcuucuccucacuguguag

SEQ ID NO: 113 - RNA, 22 nt, Artificial Sequence
  Synthetic
cucacuguguagccacaucugc

SEQ ID NO: 114 - RNA, 22 nt, Artificial Sequence
  Synthetic
cuccucacuguguagccacauc

SEQ ID NO: 115 - RNA, 22 nt, Artificial Sequence
  Synthetic
cuggcuagcuucuccucacugu

SEQ ID NO: 116 - RNA, 22 nt, Artificial Sequence
  Synthetic
cuguguagccacaucugcuaug

SEQ ID NO: 117 - RNA, 22 nt, Artificial Sequence
  Synthetic
cuucuccucacuguguagccac

SEQ ID NO: 118 - RNA, 22 nt, Artificial Sequence
  Synthetic
gagggcuggcuagcuucuccuc

SEQ ID NO: 119 - RNA, 22 nt, Artificial Sequence
  Synthetic
gauguggcuacacagugaggag

SEQ ID NO: 120 - RNA, 22 nt, Artificial Sequence
  Synthetic
gcagauguggcuacacagugag

SEQ ID NO: 121 - RNA, 22 nt, Artificial Sequence
  Synthetic
gcuacacagugaggagaagcua

SEQ ID NO: 122 - RNA, 22 nt, Artificial Sequence
  Synthetic
gcuagcuucuccucacugugua

SEQ ID NO: 123 - RNA, 22 nt, Artificial Sequence
  Synthetic
gcuggcuagcuucuccucacug

SEQ ID NO: 124 - RNA, 22 nt, Artificial Sequence
  Synthetic
gcuucuccucacuguguagcca

SEQ ID NO: 125 - RNA, 22 nt, Artificial Sequence
  Synthetic
ggcuacacagugaggagaagcu

SEQ ID NO: 126 - RNA, 22 nt, Artificial Sequence
  Synthetic
ggcuagcuucuccucacugugu

SEQ ID NO: 127 - RNA, 22 nt, Artificial Sequence
  Synthetic
ggcuggcuagcuucuccucacu

SEQ ID NO: 128 - RNA, 22 nt, Artificial Sequence
  Synthetic
gggcuggcuagcuucuccucac

SEQ ID NO: 129 - RNA, 22 nt, Artificial Sequence
  Synthetic
guggcuacacagugaggagaag

SEQ ID NO: 130 - RNA, 22 nt, Artificial Sequence
  Synthetic
guucauagcagauguggcuaca

SEQ ID NO: 131 - RNA, 22 nt, Artificial Sequence
  Synthetic
uaaguucauagcagauguggcu

SEQ ID NO: 132 - RNA, 22 nt, Artificial Sequence
  Synthetic
uacacagugaggagaagcuagc

SEQ ID NO: 133 - RNA, 22 nt, Artificial Sequence
  Synthetic
uagcagauguggcuacacagug

SEQ ID NO: 134 - RNA, 22 nt, Artificial Sequence
  Synthetic
uagcuucuccucacuguguagc

SEQ ID NO: 135 - RNA, 22 nt, Artificial Sequence
  Synthetic
ucacuguguagccacaucugcu

SEQ ID NO: 136 - RNA, 22 nt, Artificial Sequence
  Synthetic
ucauagcagauguggcuacaca

SEQ ID NO: 137 - RNA, 22 nt, Artificial Sequence
  Synthetic
uccucacuguguagccacaucu

SEQ ID NO: 138 - RNA, 22 nt, Artificial Sequence
  Synthetic
ucuccucacuguguagccacau

SEQ ID NO: 139 - RNA, 22 nt, Artificial Sequence
  Synthetic
uggcuacacagugaggagaagc

SEQ ID NO: 140 - RNA, 22 nt, Artificial Sequence
  Synthetic
uggcuagcuucuccucacugug

SEQ ID NO: 141 - RNA, 22 nt, Artificial Sequence
  Synthetic
uguggcuacacagugaggagaa

SEQ ID NO: 142 - RNA, 22 nt, Artificial Sequence
  Synthetic
uguguagccacaucugcuauga

SEQ ID NO: 143 - RNA, 22 nt, Artificial Sequence
  Synthetic
uucauagcagauguggcuacac

SEQ ID NO: 144 - RNA, 22 nt, Artificial Sequence
  Synthetic
uucuccucacuguguagccaca

SEQ ID NO: 145 - RNA, 20 nt, Artificial Sequence
  Synthetic
aaaucuggaagaagagacgg

SEQ ID NO: 146 - RNA, 20 nt, Artificial Sequence
  Synthetic
aacuuaucccgucucuucuu

SEQ ID NO: 147 - RNA, 20 nt, Artificial Sequence
  Synthetic
aagaagagacgggauaaguu

SEQ ID NO: 148 - RNA, 20 nt, Artificial Sequence
  Synthetic
aagagacgggauaaguucau

SEQ ID NO: 149 - RNA, 20 nt, Artificial Sequence
  Synthetic
aaucuggaagaagagacggg

SEQ ID NO: 150 - RNA, 20 nt, Artificial Sequence
  Synthetic
acaucugcuaugaacuuauc

SEQ ID NO: 151 - RNA, 20 nt, Artificial Sequence
  Synthetic
acgggauaaguucauagcag

SEQ ID NO: 152 - RNA, 20 nt, Artificial Sequence
  Synthetic
acuuaucccgucucuucuuc

SEQ ID NO: 153 - RNA, 20 nt, Artificial Sequence
  Synthetic
agaagagacgggauaaguuc

SEQ ID NO: 154 - RNA, 20 nt, Artificial Sequence
  Synthetic
agacgggauaaguucauagc

SEQ ID NO: 155 - RNA, 20 nt, Artificial Sequence
  Synthetic
agagacgggauaaguucaua

SEQ ID NO: 156 - RNA, 20 nt, Artificial Sequence
  Synthetic
aucccgucucuucuuccaga

SEQ ID NO: 157 - RNA, 20 nt, Artificial Sequence
  Synthetic
aucugcuaugaacuuauccc

SEQ ID NO: 158 - RNA, 20 nt, Artificial Sequence
  Synthetic
aucuggaagaagagacggga

SEQ ID NO: 159 - RNA, 20 nt, Artificial Sequence
  Synthetic
augaacuuaucccgucucuu

SEQ ID NO: 160 - RNA, 20 nt, Artificial Sequence
  Synthetic
auggaaaucuggaagaagag

SEQ ID NO: 161 - RNA, 20 nt, Artificial Sequence
  Synthetic
cacaucugcuaugaacuuau

SEQ ID NO: 162 - RNA, 20 nt, Artificial Sequence
  Synthetic
caucugcuaugaacuuaucc

SEQ ID NO: 163 - RNA, 20 nt, Artificial Sequence
  Synthetic
cauggaaaucuggaagaaga

SEQ ID NO: 164 - RNA, 20 nt, Artificial Sequence
  Synthetic
cccgucucuucuuccagauu

SEQ ID NO: 165 - RNA, 20 nt, Artificial Sequence
  Synthetic
ccgucucuucuuccagauuu

SEQ ID NO: 166 - RNA, 20 nt, Artificial Sequence
  Synthetic
cgucucuucuuccagauuuc

SEQ ID NO: 167 - RNA, 20 nt, Artificial Sequence
  Synthetic
cuaugaacuuaucccgucuc

SEQ ID NO: 168 - RNA, 20 nt, Artificial Sequence
  Synthetic
cugcuaugaacuuaucccgu

SEQ ID NO: 169 - RNA, 20 nt, Artificial Sequence
  Synthetic
cuggaagaagagacgggaua

SEQ ID NO: 170 - RNA, 20 nt, Artificial Sequence
  Synthetic
cuuaucccgucucuucuucc

SEQ ID NO: 171 - RNA, 20 nt, Artificial Sequence
  Synthetic
gaaaucuggaagaagagacg

SEQ ID NO: 172 - RNA, 20 nt, Artificial Sequence
  Synthetic
gaacuuaucccgucucuucu

SEQ ID NO: 173 - RNA, 20 nt, Artificial Sequence
  Synthetic
gaagaagagacgggauaagu

SEQ ID NO: 174 - RNA, 20 nt, Artificial Sequence
  Synthetic
gaagagacgggauaaguuca

SEQ ID NO: 175 - RNA, 20 nt, Artificial Sequence
  Synthetic
gacgggauaaguucauagca

SEQ ID NO: 176 - RNA, 20 nt, Artificial Sequence
  Synthetic
gagacgggauaaguucauag

SEQ ID NO: 177 - RNA, 20 nt, Artificial Sequence
  Synthetic
gcuaugaacuuaucccgucu

SEQ ID NO: 178 - RNA, 20 nt, Artificial Sequence
  Synthetic
ggaaaucuggaagaagagac

SEQ ID NO: 179 - RNA, 20 nt, Artificial Sequence
  Synthetic
ggaagaagagacgggauaag

SEQ ID NO: 180 - RNA, 20 nt, Artificial Sequence
  Synthetic
uaucccgucucuucuuccag

SEQ ID NO: 181 - RNA, 20 nt, Artificial Sequence
  Synthetic
uaugaacuuaucccgucucu

SEQ ID NO: 182 - RNA, 20 nt, Artificial Sequence
  Synthetic
ucauggaaaucuggaagaag

SEQ ID NO: 183 - RNA, 20 nt, Artificial Sequence
  Synthetic
ucccgucucuucuuccagau

SEQ ID NO: 184 - RNA, 20 nt, Artificial Sequence
  Synthetic
ucugcuaugaacuuaucccg

SEQ ID NO: 185 - RNA, 20 nt, Artificial Sequence
  Synthetic
ucuggaagaagagacgggau

SEQ ID NO: 186 - RNA, 20 nt, Artificial Sequence
  Synthetic
ugaacuuaucccgucucuuc

SEQ ID NO: 187 - RNA, 20 nt, Artificial Sequence
  Synthetic
ugcuaugaacuuaucccguc

SEQ ID NO: 188 - RNA, 20 nt, Artificial Sequence
  Synthetic
uggaaaucuggaagaagaga

SEQ ID NO: 189 - RNA, 20 nt, Artificial Sequence
  Synthetic
uggaagaagagacgggauaa

SEQ ID NO: 190 - RNA, 20 nt, Artificial Sequence
  Synthetic
uuaucccgucucuucuucca

SEQ ID NO: 191 - RNA, 21 nt, Artificial Sequence
  Synthetic
aaaucuggaagaagagacggg

SEQ ID NO: 192 - RNA, 21 nt, Artificial Sequence
  Synthetic
aacuuaucccgucucuucuuc

SEQ ID NO: 193 - RNA, 21 nt, Artificial Sequence
  Synthetic
aagaagagacgggauaaguuc

SEQ ID NO: 194 - RNA, 21 nt, Artificial Sequence
  Synthetic
aagagacgggauaaguucaua

SEQ ID NO: 195 - RNA, 21 nt, Artificial Sequence
  Synthetic
aaucuggaagaagagacggga

SEQ ID NO: 196 - RNA, 21 nt, Artificial Sequence
  Synthetic
acaucugcuaugaacuuaucc

SEQ ID NO: 197 - RNA, 21 nt, Artificial Sequence
  Synthetic
acgggauaaguucauagcaga

SEQ ID NO: 198 - RNA, 21 nt, Artificial Sequence
  Synthetic
acuuaucccgucucuucuucc

SEQ ID NO: 199 - RNA, 21 nt, Artificial Sequence
  Synthetic
agaagagacgggauaaguuca

SEQ ID NO: 200 - RNA, 21 nt, Artificial Sequence
  Synthetic
agacgggauaaguucauagca

SEQ ID NO: 201 - RNA, 21 nt, Artificial Sequence
  Synthetic
agagacgggauaaguucauag

SEQ ID NO: 202 - RNA, 21 nt, Artificial Sequence
  Synthetic
aucccgucucuucuuccagau

SEQ ID NO: 203 - RNA, 21 nt, Artificial Sequence
  Synthetic
aucugcuaugaacuuaucccg

SEQ ID NO: 204 - RNA, 21 nt, Artificial Sequence
  Synthetic
aucuggaagaagagacgggau

SEQ ID NO: 205 - RNA, 21 nt, Artificial Sequence
  Synthetic
augaacuuaucccgucucuuc

SEQ ID NO: 206 - RNA, 21 nt, Artificial Sequence
  Synthetic
auggaaaucuggaagaagaga

SEQ ID NO: 207 - RNA, 21 nt, Artificial Sequence
  Synthetic
cacaucugcuaugaacuuauc

SEQ ID NO: 208 - RNA, 21 nt, Artificial Sequence
  Synthetic
caucugcuaugaacuuauccc

SEQ ID NO: 209 - RNA, 21 nt, Artificial Sequence
  Synthetic
cauggaaaucuggaagaagag

SEQ ID NO: 210 - RNA, 21 nt, Artificial Sequence
  Synthetic
ccacaucugcuaugaacuuau

SEQ ID NO: 211 - RNA, 21 nt, Artificial Sequence
  Synthetic
cccgucucuucuuccagauuu

SEQ ID NO: 212 - RNA, 21 nt, Artificial Sequence
  Synthetic
ccgucucuucuuccagauuuc

SEQ ID NO: 213 - RNA, 21 nt, Artificial Sequence
  Synthetic
cgucucuucuuccagauuucc

SEQ ID NO: 214 - RNA, 21 nt, Artificial Sequence
  Synthetic
cuaugaacuuaucccgucucu

SEQ ID NO: 215 - RNA, 21 nt, Artificial Sequence
  Synthetic
cugcuaugaacuuaucccguc

SEQ ID NO: 216 - RNA, 21 nt, Artificial Sequence
  Synthetic
cuggaagaagagacgggauaa

SEQ ID NO: 217 - RNA, 21 nt, Artificial Sequence
  Synthetic
cuuaucccgucucuucuucca

SEQ ID NO: 218 - RNA, 21 nt, Artificial Sequence
  Synthetic
gaaaucuggaagaagagacgg

SEQ ID NO: 219 - RNA, 21 nt, Artificial Sequence
  Synthetic
gaacuuaucccgucucuucuu

SEQ ID NO: 220 - RNA, 21 nt, Artificial Sequence
  Synthetic
gaagaagagacgggauaaguu

SEQ ID NO: 221 - RNA, 21 nt, Artificial Sequence
  Synthetic
gaagagacgggauaaguucau

SEQ ID NO: 222 - RNA, 21 nt, Artificial Sequence
  Synthetic
gacgggauaaguucauagcag

SEQ ID NO: 223 - RNA, 21 nt, Artificial Sequence
  Synthetic
gagacgggauaaguucauagc

SEQ ID NO: 224 - RNA, 21 nt, Artificial Sequence
  Synthetic
gcuaugaacuuaucccgucuc

SEQ ID NO: 225 - RNA, 21 nt, Artificial Sequence
  Synthetic
ggaaaucuggaagaagagacg

SEQ ID NO: 226 - RNA, 21 nt, Artificial Sequence
  Synthetic
ggaagaagagacgggauaagu

SEQ ID NO: 227 - RNA, 21 nt, Artificial Sequence
  Synthetic
uaucccgucucuucuuccaga

SEQ ID NO: 228 - RNA, 21 nt, Artificial Sequence
  Synthetic
uaugaacuuaucccgucucuu

SEQ ID NO: 229 - RNA, 21 nt, Artificial Sequence
  Synthetic
ucauggaaaucuggaagaaga

SEQ ID NO: 230 - RNA, 21 nt, Artificial Sequence
  Synthetic
ucccgucucuucuuccagauu

SEQ ID NO: 231 - RNA, 21 nt, Artificial Sequence
  Synthetic
ucugcuaugaacuuaucccgu

SEQ ID NO: 232 - RNA, 21 nt, Artificial Sequence
  Synthetic
ucuggaagaagagacgggaua

SEQ ID NO: 233 - RNA, 21 nt, Artificial Sequence
  Synthetic
ugaacuuaucccgucucuucu

SEQ ID NO: 234 - RNA, 21 nt, Artificial Sequence
  Synthetic
ugcuaugaacuuaucccgucu

SEQ ID NO: 235 - RNA, 21 nt, Artificial Sequence
  Synthetic
uggaaaucuggaagaagagac

SEQ ID NO: 236 - RNA, 21 nt, Artificial Sequence
  Synthetic
uggaagaagagacgggauaag

SEQ ID NO: 237 - RNA, 21 nt, Artificial Sequence
  Synthetic
uuaucccgucucuucuuccag

SEQ ID NO: 238 - RNA, 21 nt, Artificial Sequence
  Synthetic
uucauggaaaucuggaagaag

SEQ ID NO: 239 - RNA, 22 nt, Artificial Sequence
  Synthetic
aaaucuggaagaagagacggga

SEQ ID NO: 240 - RNA, 22 nt, Artificial Sequence
  Synthetic
aacuuaucccgucucuucuucc

SEQ ID NO: 241 - RNA, 22 nt, Artificial Sequence
  Synthetic
aagaagagacgggauaaguuca

SEQ ID NO: 242 - RNA, 22 nt, Artificial Sequence
  Synthetic
aagagacgggauaaguucauag

SEQ ID NO: 243 - RNA, 22 nt, Artificial Sequence
  Synthetic
aaucuggaagaagagacgggau

SEQ ID NO: 244 - RNA, 22 nt, Artificial Sequence
  Synthetic
acaucugcuaugaacuuauccc

SEQ ID NO: 245 - RNA, 22 nt, Artificial Sequence
  Synthetic
acgggauaaguucauagcagau

SEQ ID NO: 246 - RNA, 22 nt, Artificial Sequence
  Synthetic
acuuaucccgucucuucuucca

SEQ ID NO: 247 - RNA, 22 nt, Artificial Sequence
  Synthetic
agaagagacgggauaaguucau

SEQ ID NO: 248 - RNA, 22 nt, Artificial Sequence
  Synthetic
agacgggauaaguucauagcag

SEQ ID NO: 249 - RNA, 22 nt, Artificial Sequence
  Synthetic
agagacgggauaaguucauagc

SEQ ID NO: 250 - RNA, 22 nt, Artificial Sequence
  Synthetic
aucccgucucuucuuccagauu

SEQ ID NO: 251 - RNA, 22 nt, Artificial Sequence
  Synthetic
aucugcuaugaacuuaucccgu

SEQ ID NO: 252 - RNA, 22 nt, Artificial Sequence
  Synthetic
aucuggaagaagagacgggaua

SEQ ID NO: 253 - RNA, 22 nt, Artificial Sequence
  Synthetic
augaacuuaucccgucucuucu

SEQ ID NO: 254 - RNA, 22 nt, Artificial Sequence
  Synthetic
auggaaaucuggaagaagagac

SEQ ID NO: 255 - RNA, 22 nt, Artificial Sequence
  Synthetic
cacaucugcuaugaacuuaucc

SEQ ID NO: 256 - RNA, 22 nt, Artificial Sequence
  Synthetic
caucugcuaugaacuuaucccg

SEQ ID NO: 257 - RNA, 22 nt, Artificial Sequence
  Synthetic
cauggaaaucuggaagaagaga

SEQ ID NO: 258 - RNA, 22 nt, Artificial Sequence
  Synthetic
ccacaucugcuaugaacuuauc

SEQ ID NO: 259 - RNA, 22 nt, Artificial Sequence
  Synthetic
cccgucucuucuuccagauuuc

SEQ ID NO: 260 - RNA, 22 nt, Artificial Sequence
  Synthetic
ccgucucuucuuccagauuucc

SEQ ID NO: 261 - RNA, 22 nt, Artificial Sequence
  Synthetic
cgucucuucuuccagauuucca

SEQ ID NO: 262 - RNA, 22 nt, Artificial Sequence
  Synthetic
cuaugaacuuaucccgucucuu

SEQ ID NO: 263 - RNA, 22 nt, Artificial Sequence
  Synthetic
cugcuaugaacuuaucccgucu

SEQ ID NO: 264 - RNA, 22 nt, Artificial Sequence
  Synthetic
cuggaagaagagacgggauaag

SEQ ID NO: 265 - RNA, 22 nt, Artificial Sequence
  Synthetic
cuuaucccgucucuucuuccag

SEQ ID NO: 266 - RNA, 22 nt, Artificial Sequence
  Synthetic
gaaaucuggaagaagagacggg

SEQ ID NO: 267 - RNA, 22 nt, Artificial Sequence
  Synthetic
gaacuuaucccgucucuucuuc

SEQ ID NO: 268 - RNA, 22 nt, Artificial Sequence
  Synthetic
gaagaagagacgggauaaguuc

SEQ ID NO: 269 - RNA, 22 nt, Artificial Sequence
  Synthetic
gaagagacgggauaaguucaua

SEQ ID NO: 270 - RNA, 22 nt, Artificial Sequence
  Synthetic
gacgggauaaguucauagcaga

SEQ ID NO: 271 - RNA, 22 nt, Artificial Sequence
  Synthetic
gagacgggauaaguucauagca

SEQ ID NO: 272 - RNA, 22 nt, Artificial Sequence
  Synthetic
gccacaucugcuaugaacuuau

SEQ ID NO: 273 - RNA, 22 nt, Artificial Sequence
  Synthetic
gcuaugaacuuaucccgucucu

SEQ ID NO: 274 - RNA, 22 nt, Artificial Sequence
  Synthetic
ggaaaucuggaagaagagacgg

SEQ ID NO: 275 - RNA, 22 nt, Artificial Sequence
  Synthetic
ggaagaagagacgggauaaguu

SEQ ID NO: 276 - RNA, 22 nt, Artificial Sequence
  Synthetic
uaucccgucucuucuuccagau

SEQ ID NO: 277 - RNA, 22 nt, Artificial Sequence
  Synthetic
uaugaacuuaucccgucucuuc

SEQ ID NO: 278 - RNA, 22 nt, Artificial Sequence
  Synthetic
ucauggaaaucuggaagaagag

SEQ ID NO: 279 - RNA, 22 nt, Artificial Sequence
  Synthetic
ucccgucucuucuuccagauuu

SEQ ID NO: 280 - RNA, 22 nt, Artificial Sequence
  Synthetic
ucugcuaugaacuuaucccguc

SEQ ID NO: 281 - RNA, 22 nt, Artificial Sequence
  Synthetic
ucuggaagaagagacgggauaa

SEQ ID NO: 282 - RNA, 22 nt, Artificial Sequence
  Synthetic
ugaacuuaucccgucucuucuu

SEQ ID NO: 283 - RNA, 22 nt, Artificial Sequence
  Synthetic
ugcuaugaacuuaucccgucuc

SEQ ID NO: 284 - RNA, 22 nt, Artificial Sequence
  Synthetic
uggaaaucuggaagaagagacg

SEQ ID NO: 285 - RNA, 22 nt, Artificial Sequence
  Synthetic
uggaagaagagacgggauaagu

SEQ ID NO: 286 - RNA, 22 nt, Artificial Sequence
  Synthetic
uuaucccgucucuucuuccaga

SEQ ID NO: 287 - RNA, 22 nt, Artificial Sequence
  Synthetic
uucauggaaaucuggaagaaga

SEQ ID NO: 288 - RNA, 22 nt, Artificial Sequence
  Synthetic
uuucauggaaaucuggaagaag

SEQ ID NO: 289 - RNA, 20 nt, Artificial Sequence
  Synthetic
aaaguauuuuugucacucuc

SEQ ID NO: 290 - RNA, 20 nt, Artificial Sequence
  Synthetic
aaguauuuuugucacucucc

SEQ ID NO: 291 - RNA, 20 nt, Artificial Sequence
  Synthetic
acaaaaauacuuucauggaa

SEQ ID NO: 292 - RNA, 20 nt, Artificial Sequence
  Synthetic
acaguacccuguuggagagu

SEQ ID NO: 293 - RNA, 20 nt, Artificial Sequence
  Synthetic
acccuguuggagagugacaa

SEQ ID NO: 294 - RNA, 20 nt, Artificial Sequence
  Synthetic
agagugacaaaaauacuuuc

SEQ ID NO: 295 - RNA, 20 nt, Artificial Sequence
  Synthetic
agauuuccaugaaaguauuu

SEQ ID NO: 296 - RNA, 20 nt, Artificial Sequence
  Synthetic
aguacccuguuggagaguga

SEQ ID NO: 297 - RNA, 20 nt, Artificial Sequence
  Synthetic
aguauuuuugucacucucca

SEQ ID NO: 298 - RNA, 20 nt, Artificial Sequence
  Synthetic
agugacaaaaauacuuucau

SEQ ID NO: 299 - RNA, 20 nt, Artificial Sequence
  Synthetic
augaaaguauuuuugucacu

SEQ ID NO: 300 - RNA, 20 nt, Artificial Sequence
  Synthetic
auuuccaugaaaguauuuuu

SEQ ID NO: 301 - RNA, 20 nt, Artificial Sequence
  Synthetic
auuuuugucacucuccaaca

SEQ ID NO: 302 - RNA, 20 nt, Artificial Sequence
  Synthetic
cagauuuccaugaaaguauu

SEQ ID NO: 303 - RNA, 20 nt, Artificial Sequence
  Synthetic
caguacccuguuggagagug

SEQ ID NO: 304 - RNA, 20 nt, Artificial Sequence
  Synthetic
caugaaaguauuuuugucac

SEQ ID NO: 305 - RNA, 20 nt, Artificial Sequence
  Synthetic
ccaugaaaguauuuuuguca

SEQ ID NO: 306 - RNA, 20 nt, Artificial Sequence
  Synthetic
cccuguuggagagugacaaa

SEQ ID NO: 307 - RNA, 20 nt, Artificial Sequence
  Synthetic
ccuguuggagagugacaaaa

SEQ ID NO: 308 - RNA, 20 nt, Artificial Sequence
  Synthetic
cuguuggagagugacaaaaa

SEQ ID NO: 309 - RNA, 20 nt, Artificial Sequence
  Synthetic
gaaaguauuuuugucacucu

SEQ ID NO: 310 - RNA, 20 nt, Artificial Sequence
  Synthetic
gacaaaaauacuuucaugga

SEQ ID NO: 311 - RNA, 20 nt, Artificial Sequence
  Synthetic
gagagugacaaaaauacuuu

SEQ ID NO: 312 - RNA, 20 nt, Artificial Sequence
  Synthetic
gagugacaaaaauacuuuca

SEQ ID NO: 313 - RNA, 20 nt, Artificial Sequence
  Synthetic
gauuuccaugaaaguauuuu

SEQ ID NO: 314 - RNA, 20 nt, Artificial Sequence
  Synthetic
ggagagugacaaaaauacuu

SEQ ID NO: 315 - RNA, 20 nt, Artificial Sequence
  Synthetic
guacccuguuggagagugac

SEQ ID NO: 316 - RNA, 20 nt, Artificial Sequence
  Synthetic
guauuuuugucacucuccaa

SEQ ID NO: 317 - RNA, 20 nt, Artificial Sequence
  Synthetic
gugacaaaaauacuuucaug

SEQ ID NO: 318 - RNA, 20 nt, Artificial Sequence
  Synthetic
guuggagagugacaaaaaua

SEQ ID NO: 319 - RNA, 20 nt, Artificial Sequence
  Synthetic
uacaguacccuguuggagag

SEQ ID NO: 320 - RNA, 20 nt, Artificial Sequence
  Synthetic
uacccuguuggagagugaca

SEQ ID NO: 321 - RNA, 20 nt, Artificial Sequence
  Synthetic
uauuuuugucacucuccaac

SEQ ID NO: 322 - RNA, 20 nt, Artificial Sequence
  Synthetic
uccaugaaaguauuuuuguc

SEQ ID NO: 323 - RNA, 20 nt, Artificial Sequence
  Synthetic
ugaaaguauuuuugucacuc

SEQ ID NO: 324 - RNA, 20 nt, Artificial Sequence
  Synthetic
ugacaaaaauacuuucaugg

SEQ ID NO: 325 - RNA, 20 nt, Artificial Sequence
  Synthetic
uggagagugacaaaaauacu

SEQ ID NO: 326 - RNA, 20 nt, Artificial Sequence
  Synthetic
ugucacucuccaacagggua

SEQ ID NO: 327 - RNA, 20 nt, Artificial Sequence
  Synthetic
uguuggagagugacaaaaau

SEQ ID NO: 328 - RNA, 20 nt, Artificial Sequence
  Synthetic
uuccaugaaaguauuuuugu

SEQ ID NO: 329 - RNA, 20 nt, Artificial Sequence
  Synthetic
uuggagagugacaaaaauac

SEQ ID NO: 330 - RNA, 20 nt, Artificial Sequence
  Synthetic
uugucacucuccaacagggu

SEQ ID NO: 331 - RNA, 20 nt, Artificial Sequence
  Synthetic
uuuccaugaaaguauuuuug

SEQ ID NO: 332 - RNA, 20 nt, Artificial Sequence
  Synthetic
uuugucacucuccaacaggg

SEQ ID NO: 333 - RNA, 20 nt, Artificial Sequence
  Synthetic
uuuugucacucuccaacagg

SEQ ID NO: 334 - RNA, 20 nt, Artificial Sequence
  Synthetic
uuuuugucacucuccaacag

SEQ ID NO: 335 - RNA, 21 nt, Artificial Sequence
  Synthetic
aaaguauuuuugucacucucc

SEQ ID NO: 336 - RNA, 21 nt, Artificial Sequence
  Synthetic
aaguauuuuugucacucucca

SEQ ID NO: 337 - RNA, 21 nt, Artificial Sequence
  Synthetic
acaaaaauacuuucauggaaa

SEQ ID NO: 338 - RNA, 21 nt, Artificial Sequence
  Synthetic
acaguacccuguuggagagug

SEQ ID NO: 339 - RNA, 21 nt, Artificial Sequence
  Synthetic
acccuguuggagagugacaaa

SEQ ID NO: 340 - RNA, 21 nt, Artificial Sequence
  Synthetic
agagugacaaaaauacuuuca

SEQ ID NO: 341 - RNA, 21 nt, Artificial Sequence
  Synthetic
agauuuccaugaaaguauuuu

SEQ ID NO: 342 - RNA, 21 nt, Artificial Sequence
  Synthetic
aguacccuguuggagagugac

SEQ ID NO: 343 - RNA, 21 nt, Artificial Sequence
  Synthetic
aguauuuuugucacucuccaa

SEQ ID NO: 344 - RNA, 21 nt, Artificial Sequence
  Synthetic
agugacaaaaauacuuucaug

SEQ ID NO: 345 - RNA, 21 nt, Artificial Sequence
  Synthetic
augaaaguauuuuugucacuc

SEQ ID NO: 346 - RNA, 21 nt, Artificial Sequence
  Synthetic
auuuccaugaaaguauuuuug

SEQ ID NO: 347 - RNA, 21 nt, Artificial Sequence
  Synthetic
auuuuugucacucuccaacag

SEQ ID NO: 348 - RNA, 21 nt, Artificial Sequence
  Synthetic
cagauuuccaugaaaguauuu

SEQ ID NO: 349 - RNA, 21 nt, Artificial Sequence
  Synthetic
caguacccuguuggagaguga

SEQ ID NO: 350 - RNA, 21 nt, Artificial Sequence
  Synthetic
caugaaaguauuuuugucacu

SEQ ID NO: 351 - RNA, 21 nt, Artificial Sequence
  Synthetic
ccagauuuccaugaaaguauu

SEQ ID NO: 352 - RNA, 21 nt, Artificial Sequence
  Synthetic
ccaugaaaguauuuuugucac

SEQ ID NO: 353 - RNA, 21 nt, Artificial Sequence
  Synthetic
cccuguuggagagugacaaaa

SEQ ID NO: 354 - RNA, 21 nt, Artificial Sequence
  Synthetic
ccuguuggagagugacaaaaa

SEQ ID NO: 355 - RNA, 21 nt, Artificial Sequence
  Synthetic
cuguuggagagugacaaaaau

SEQ ID NO: 356 - RNA, 21 nt, Artificial Sequence
  Synthetic
gaaaguauuuuugucacucuc

SEQ ID NO: 357 - RNA, 21 nt, Artificial Sequence
  Synthetic
gacaaaaauacuuucauggaa

SEQ ID NO: 358 - RNA, 21 nt, Artificial Sequence
  Synthetic
gagagugacaaaaauacuuuc

SEQ ID NO: 359 - RNA, 21 nt, Artificial Sequence
  Synthetic
gagugacaaaaauacuuucau

SEQ ID NO: 360 - RNA, 21 nt, Artificial Sequence
  Synthetic
gauuuccaugaaaguauuuuu

SEQ ID NO: 361 - RNA, 21 nt, Artificial Sequence
  Synthetic
ggagagugacaaaaauacuuu

SEQ ID NO: 362 - RNA, 21 nt, Artificial Sequence
  Synthetic
guacaguacccuguuggagag

SEQ ID NO: 363 - RNA, 21 nt, Artificial Sequence
  Synthetic
guacccuguuggagagugaca

SEQ ID NO: 364 - RNA, 21 nt, Artificial Sequence
  Synthetic
guauuuuugucacucuccaac

SEQ ID NO: 365 - RNA, 21 nt, Artificial Sequence
  Synthetic
gugacaaaaauacuuucaugg

SEQ ID NO: 366 - RNA, 21 nt, Artificial Sequence
  Synthetic
guuggagagugacaaaaauac

SEQ ID NO: 367 - RNA, 21 nt, Artificial Sequence
  Synthetic
uacaguacccuguuggagagu

SEQ ID NO: 368 - RNA, 21 nt, Artificial Sequence
  Synthetic
uacccuguuggagagugacaa

SEQ ID NO: 369 - RNA, 21 nt, Artificial Sequence
  Synthetic
uauuuuugucacucuccaaca

SEQ ID NO: 370 - RNA, 21 nt, Artificial Sequence
  Synthetic
uccaugaaaguauuuuuguca

SEQ ID NO: 371 - RNA, 21 nt, Artificial Sequence
  Synthetic
ugaaaguauuuuugucacucu

SEQ ID NO: 372 - RNA, 21 nt, Artificial Sequence
  Synthetic
ugacaaaaauacuuucaugga

SEQ ID NO: 373 - RNA, 21 nt, Artificial Sequence
  Synthetic
uggagagugacaaaaauacuu

SEQ ID NO: 374 - RNA, 21 nt, Artificial Sequence
  Synthetic
ugucacucuccaacaggguac

SEQ ID NO: 375 - RNA, 21 nt, Artificial Sequence
  Synthetic
uguuggagagugacaaaaaua

SEQ ID NO: 376 - RNA, 21 nt, Artificial Sequence
  Synthetic
uuccaugaaaguauuuuuguc

SEQ ID NO: 377 - RNA, 21 nt, Artificial Sequence
  Synthetic
uuggagagugacaaaaauacu

SEQ ID NO: 378 - RNA, 21 nt, Artificial Sequence
  Synthetic
uugucacucuccaacagggua

SEQ ID NO: 379 - RNA, 21 nt, Artificial Sequence
  Synthetic
uuuccaugaaaguauuuuugu

SEQ ID NO: 380 - RNA, 21 nt, Artificial Sequence
  Synthetic
uuugucacucuccaacagggu

SEQ ID NO: 381 - RNA, 21 nt, Artificial Sequence
  Synthetic
uuuugucacucuccaacaggg

SEQ ID NO: 382 - RNA, 21 nt, Artificial Sequence
  Synthetic
uuuuugucacucuccaacagg

SEQ ID NO: 383 - RNA, 22 nt, Artificial Sequence
  Synthetic
aaaguauuuuugucacucucca

SEQ ID NO: 384 - RNA, 22 nt, Artificial Sequence
  Synthetic
aaguauuuuugucacucuccaa

SEQ ID NO: 385 - RNA, 22 nt, Artificial Sequence
  Synthetic
acaaaaauacuuucauggaaau

SEQ ID NO: 386 - RNA, 22 nt, Artificial Sequence
  Synthetic
acaguacccuguuggagaguga

SEQ ID NO: 387 - RNA, 22 nt, Artificial Sequence
  Synthetic
acccuguuggagagugacaaaa

SEQ ID NO: 388 - RNA, 22 nt, Artificial Sequence
  Synthetic
agagugacaaaaauacuuucau

SEQ ID NO: 389 - RNA, 22 nt, Artificial Sequence
  Synthetic
agauuuccaugaaaguauuuuu

SEQ ID NO: 390 - RNA, 22 nt, Artificial Sequence
  Synthetic
aguacccuguuggagagugaca

SEQ ID NO: 391 - RNA, 22 nt, Artificial Sequence
  Synthetic
aguauuuuugucacucuccaac

SEQ ID NO: 392 - RNA, 22 nt, Artificial Sequence
  Synthetic
agugacaaaaauacuuucaugg

SEQ ID NO: 393 - RNA, 22 nt, Artificial Sequence
  Synthetic
augaaaguauuuuugucacucu

SEQ ID NO: 394 - RNA, 22 nt, Artificial Sequence
  Synthetic
auuuccaugaaaguauuuuugu

SEQ ID NO: 395 - RNA, 22 nt, Artificial Sequence
  Synthetic
auuuuugucacucuccaacagg

SEQ ID NO: 396 - RNA, 22 nt, Artificial Sequence
  Synthetic
cagauuuccaugaaaguauuuu

SEQ ID NO: 397 - RNA, 22 nt, Artificial Sequence
  Synthetic
caguacccuguuggagagugac

SEQ ID NO: 398 - RNA, 22 nt, Artificial Sequence
  Synthetic
caugaaaguauuuuugucacuc

SEQ ID NO: 399 - RNA, 22 nt, Artificial Sequence
  Synthetic
ccagauuuccaugaaaguauuu

SEQ ID NO: 400 - RNA, 22 nt, Artificial Sequence
  Synthetic
ccaugaaaguauuuuugucacu

SEQ ID NO: 401 - RNA, 22 nt, Artificial Sequence
  Synthetic
cccuguuggagagugacaaaaa

SEQ ID NO: 402 - RNA, 22 nt, Artificial Sequence
  Synthetic
ccuguuggagagugacaaaaau

SEQ ID NO: 403 - RNA, 22 nt, Artificial Sequence
  Synthetic
cuguuggagagugacaaaaaua

SEQ ID NO: 404 - RNA, 22 nt, Artificial Sequence
  Synthetic
gaaaguauuuuugucacucucc

SEQ ID NO: 405 - RNA, 22 nt, Artificial Sequence
  Synthetic
gacaaaaauacuuucauggaaa

SEQ ID NO: 406 - RNA, 22 nt, Artificial Sequence
  Synthetic
gagagugacaaaaauacuuuca

SEQ ID NO: 407 - RNA, 22 nt, Artificial Sequence
  Synthetic
gagugacaaaaauacuuucaug

SEQ ID NO: 408 - RNA, 22 nt, Artificial Sequence
  Synthetic
gauuuccaugaaaguauuuuug

SEQ ID NO: 409 - RNA, 22 nt, Artificial Sequence
  Synthetic
ggagagugacaaaaauacuuuc

SEQ ID NO: 410 - RNA, 22 nt, Artificial Sequence
  Synthetic
gguacaguacccuguuggagag

SEQ ID NO: 411 - RNA, 22 nt, Artificial Sequence
  Synthetic
guacaguacccuguuggagagu

SEQ ID NO: 412 - RNA, 22 nt, Artificial Sequence
  Synthetic
guacccuguuggagagugacaa

SEQ ID NO: 413 - RNA, 22 nt, Artificial Sequence
  Synthetic
guauuuuugucacucuccaaca

SEQ ID NO: 414 - RNA, 22 nt, Artificial Sequence
  Synthetic
gugacaaaaauacuuucaugga

SEQ ID NO: 415 - RNA, 22 nt, Artificial Sequence
  Synthetic
guuggagagugacaaaaauacu

SEQ ID NO: 416 - RNA, 22 nt, Artificial Sequence
  Synthetic
uacaguacccuguuggagagug

SEQ ID NO: 417 - RNA, 22 nt, Artificial Sequence
  Synthetic
uacccuguuggagagugacaaa

SEQ ID NO: 418 - RNA, 22 nt, Artificial Sequence
  Synthetic
uauuuuugucacucuccaacag

SEQ ID NO: 419 - RNA, 22 nt, Artificial Sequence
  Synthetic
uccagauuuccaugaaaguauu

SEQ ID NO: 420 - RNA, 22 nt, Artificial Sequence
  Synthetic
uccaugaaaguauuuuugucac

SEQ ID NO: 421 - RNA, 22 nt, Artificial Sequence
  Synthetic
ugaaaguauuuuugucacucuc

SEQ ID NO: 422 - RNA, 22 nt, Artificial Sequence
  Synthetic
ugacaaaaauacuuucauggaa

SEQ ID NO: 423 - RNA, 22 nt, Artificial Sequence
  Synthetic
uggagagugacaaaaauacuuu

SEQ ID NO: 424 - RNA, 22 nt, Artificial Sequence
  Synthetic
ugucacucuccaacaggguacu

SEQ ID NO: 425 - RNA, 22 nt, Artificial Sequence
  Synthetic
uguuggagagugacaaaaauac

SEQ ID NO: 426 - RNA, 22 nt, Artificial Sequence
  Synthetic
uuccaugaaaguauuuuuguca

SEQ ID NO: 427 - RNA, 22 nt, Artificial Sequence
  Synthetic
uuggagagugacaaaaauacuu

SEQ ID NO: 428 - RNA, 22 nt, Artificial Sequence
  Synthetic
uugucacucuccaacaggguac

SEQ ID NO: 429 - RNA, 22 nt, Artificial Sequence
  Synthetic
uuuccaugaaaguauuuuuguc

SEQ ID NO: 430 - RNA, 22 nt, Artificial Sequence
  Synthetic
uuugucacucuccaacagggua

SEQ ID NO: 431 - RNA, 22 nt, Artificial Sequence
  Synthetic
uuuugucacucuccaacagggu

SEQ ID NO: 432 - RNA, 22 nt, Artificial Sequence
  Synthetic
uuuuugucacucuccaacaggg

SEQ ID NO: 433 - RNA, 20 nt, Artificial Sequence
  Synthetic
aaaguauuuuucugacucuc

SEQ ID NO: 434 - RNA, 20 nt, Artificial Sequence
  Synthetic
aaguauuuuucugacucucc

SEQ ID NO: 435 - RNA, 20 nt, Artificial Sequence
  Synthetic
acccuguuggagagucagaa

SEQ ID NO: 436 - RNA, 20 nt, Artificial Sequence
  Synthetic
agagucagaaaaauacuuuc

SEQ ID NO: 437 - RNA, 20 nt, Artificial Sequence
  Synthetic
aguacccuguuggagaguca

SEQ ID NO: 438 - RNA, 20 nt, Artificial Sequence
  Synthetic
aguauuuuucugacucucca

SEQ ID NO: 439 - RNA, 20 nt, Artificial Sequence
  Synthetic
agucagaaaaauacuuucau

SEQ ID NO: 440 - RNA, 20 nt, Artificial Sequence
  Synthetic
augaaaguauuuuucugacu

SEQ ID NO: 441 - RNA, 20 nt, Artificial Sequence
  Synthetic
auuuuucugacucuccaaca

SEQ ID NO: 442 - RNA, 20 nt, Artificial Sequence
  Synthetic
caguacccuguuggagaguc

SEQ ID NO: 443 - RNA, 20 nt, Artificial Sequence
  Synthetic
caugaaaguauuuuucugac

SEQ ID NO: 444 - RNA, 20 nt, Artificial Sequence
  Synthetic
ccaugaaaguauuuuucuga

SEQ ID NO: 445 - RNA, 20 nt, Artificial Sequence
  Synthetic
cccuguuggagagucagaaa

SEQ ID NO: 446 - RNA, 20 nt, Artificial Sequence
  Synthetic
ccuguuggagagucagaaaa

SEQ ID NO: 447 - RNA, 20 nt, Artificial Sequence
  Synthetic
cugacucuccaacaggguac

SEQ ID NO: 448 - RNA, 20 nt, Artificial Sequence
  Synthetic
cuguuggagagucagaaaaa

SEQ ID NO: 449 - RNA, 20 nt, Artificial Sequence
  Synthetic
gaaaguauuuuucugacucu

SEQ ID NO: 450 - RNA, 20 nt, Artificial Sequence
  Synthetic
gagagucagaaaaauacuuu

SEQ ID NO: 451 - RNA, 20 nt, Artificial Sequence
  Synthetic
gagucagaaaaauacuuuca

SEQ ID NO: 452 - RNA, 20 nt, Artificial Sequence
  Synthetic
ggagagucagaaaaauacuu

SEQ ID NO: 453 - RNA, 20 nt, Artificial Sequence
  Synthetic
gguacaguacccuguuggag

SEQ ID NO: 454 - RNA, 20 nt, Artificial Sequence
  Synthetic
guacaguacccuguuggaga

SEQ ID NO: 455 - RNA, 20 nt, Artificial Sequence
  Synthetic
guacccuguuggagagucag

SEQ ID NO: 456 - RNA, 20 nt, Artificial Sequence
  Synthetic
guauuuuucugacucuccaa

SEQ ID NO: 457 - RNA, 20 nt, Artificial Sequence
  Synthetic
gucagaaaaauacuuucaug

SEQ ID NO: 458 - RNA, 20 nt, Artificial Sequence
  Synthetic
guuggagagucagaaaaaua

SEQ ID NO: 459 - RNA, 20 nt, Artificial Sequence
  Synthetic
uacccuguuggagagucaga

SEQ ID NO: 460 - RNA, 20 nt, Artificial Sequence
  Synthetic
uauuuuucugacucuccaac

SEQ ID NO: 461 - RNA, 20 nt, Artificial Sequence
  Synthetic
ucagaaaaauacuuucaugg

SEQ ID NO: 462 - RNA, 20 nt, Artificial Sequence
  Synthetic
uccaugaaaguauuuuucug

SEQ ID NO: 463 - RNA, 20 nt, Artificial Sequence
  Synthetic
ucugacucuccaacagggua

SEQ ID NO: 464 - RNA, 20 nt, Artificial Sequence
  Synthetic
ugaaaguauuuuucugacuc

SEQ ID NO: 465 - RNA, 20 nt, Artificial Sequence
  Synthetic
ugacucuccaacaggguacu

SEQ ID NO: 466 - RNA, 20 nt, Artificial Sequence
  Synthetic
uggagagucagaaaaauacu

SEQ ID NO: 467 - RNA, 20 nt, Artificial Sequence
  Synthetic
uguuggagagucagaaaaau

SEQ ID NO: 468 - RNA, 20 nt, Artificial Sequence
  Synthetic
uuccaugaaaguauuuuucu

SEQ ID NO: 469 - RNA, 20 nt, Artificial Sequence
  Synthetic
uucugacucuccaacagggu

SEQ ID NO: 470 - RNA, 20 nt, Artificial Sequence
  Synthetic
uuggagagucagaaaaauac

SEQ ID NO: 471 - RNA, 20 nt, Artificial Sequence
  Synthetic
uuuccaugaaaguauuuuuc

SEQ ID NO: 472 - RNA, 20 nt, Artificial Sequence
  Synthetic
uuucugacucuccaacaggg

SEQ ID NO: 473 - RNA, 20 nt, Artificial Sequence
  Synthetic
uuuucugacucuccaacagg

SEQ ID NO: 474 - RNA, 20 nt, Artificial Sequence
  Synthetic
uuuuucugacucuccaacag

SEQ ID NO: 475 - RNA, 21 nt, Artificial Sequence
  Synthetic
aaaguauuuuucugacucucc

SEQ ID NO: 476 - RNA, 21 nt, Artificial Sequence
  Synthetic
aaguauuuuucugacucucca

SEQ ID NO: 477 - RNA, 21 nt, Artificial Sequence
  Synthetic
acaguacccuguuggagaguc

SEQ ID NO: 478 - RNA, 21 nt, Artificial Sequence
  Synthetic
acccuguuggagagucagaaa

SEQ ID NO: 479 - RNA, 21 nt, Artificial Sequence
  Synthetic
agagucagaaaaauacuuuca

SEQ ID NO: 480 - RNA, 21 nt, Artificial Sequence
  Synthetic
agguacaguacccuguuggag

SEQ ID NO: 481 - RNA, 21 nt, Artificial Sequence
  Synthetic
aguacccuguuggagagucag

SEQ ID NO: 482 - RNA, 21 nt, Artificial Sequence
  Synthetic
aguauuuuucugacucuccaa

SEQ ID NO: 483 - RNA, 21 nt, Artificial Sequence
  Synthetic
agucagaaaaauacuuucaug

SEQ ID NO: 484 - RNA, 21 nt, Artificial Sequence
  Synthetic
augaaaguauuuuucugacuc

SEQ ID NO: 485 - RNA, 21 nt, Artificial Sequence
  Synthetic
auuuccaugaaaguauuuuuc

SEQ ID NO: 486 - RNA, 21 nt, Artificial Sequence
  Synthetic
auuuuucugacucuccaacag

SEQ ID NO: 487 - RNA, 21 nt, Artificial Sequence
  Synthetic
caguacccuguuggagaguca

SEQ ID NO: 488 - RNA, 21 nt, Artificial Sequence
  Synthetic
caugaaaguauuuuucugacu

SEQ ID NO: 489 - RNA, 21 nt, Artificial Sequence
  Synthetic
ccaugaaaguauuuuucugac

SEQ ID NO: 490 - RNA, 21 nt, Artificial Sequence
  Synthetic
cccuguuggagagucagaaaa

SEQ ID NO: 491 - RNA, 21 nt, Artificial Sequence
  Synthetic
ccuguuggagagucagaaaaa

SEQ ID NO: 492 - RNA, 21 nt, Artificial Sequence
  Synthetic
cugacucuccaacaggguacu

SEQ ID NO: 493 - RNA, 21 nt, Artificial Sequence
  Synthetic
cuguuggagagucagaaaaau

SEQ ID NO: 494 - RNA, 21 nt, Artificial Sequence
  Synthetic
gaaaguauuuuucugacucuc

SEQ ID NO: 495 - RNA, 21 nt, Artificial Sequence
  Synthetic
gagagucagaaaaauacuuuc

SEQ ID NO: 496 - RNA, 21 nt, Artificial Sequence
  Synthetic
gagucagaaaaauacuuucau

SEQ ID NO: 497 - RNA, 21 nt, Artificial Sequence
  Synthetic
ggagagucagaaaaauacuuu

SEQ ID NO: 498 - RNA, 21 nt, Artificial Sequence
  Synthetic
gguacaguacccuguuggaga

SEQ ID NO: 499 - RNA, 21 nt, Artificial Sequence
  Synthetic
guacccuguuggagagucaga

SEQ ID NO: 500 - RNA, 21 nt, Artificial Sequence
  Synthetic
guauuuuucugacucuccaac

SEQ ID NO: 501 - RNA, 21 nt, Artificial Sequence
  Synthetic
gucagaaaaauacuuucaugg

SEQ ID NO: 502 - RNA, 21 nt, Artificial Sequence
  Synthetic
guuggagagucagaaaaauac

SEQ ID NO: 503 - RNA, 21 nt, Artificial Sequence
  Synthetic
uacccuguuggagagucagaa

SEQ ID NO: 504 - RNA, 21 nt, Artificial Sequence
  Synthetic
uauuuuucugacucuccaaca

SEQ ID NO: 505 - RNA, 21 nt, Artificial Sequence
  Synthetic
ucagaaaaauacuuucaugga

SEQ ID NO: 506 - RNA, 21 nt, Artificial Sequence
  Synthetic
uccaugaaaguauuuuucuga

SEQ ID NO: 507 - RNA, 21 nt, Artificial Sequence
  Synthetic
ucugacucuccaacaggguac

SEQ ID NO: 508 - RNA, 21 nt, Artificial Sequence
  Synthetic
ugaaaguauuuuucugacucu

SEQ ID NO: 509 - RNA, 21 nt, Artificial Sequence
  Synthetic
ugacucuccaacaggguacug

SEQ ID NO: 510 - RNA, 21 nt, Artificial Sequence
  Synthetic
uggagagucagaaaaauacuu

SEQ ID NO: 511 - RNA, 21 nt, Artificial Sequence
  Synthetic
uguuggagagucagaaaaaua

SEQ ID NO: 512 - RNA, 21 nt, Artificial Sequence
  Synthetic
uuccaugaaaguauuuuucug

SEQ ID NO: 513 - RNA, 21 nt, Artificial Sequence
  Synthetic
uucugacucuccaacagggua

SEQ ID NO: 514 - RNA, 21 nt, Artificial Sequence
  Synthetic
uuggagagucagaaaaauacu

SEQ ID NO: 515 - RNA, 21 nt, Artificial Sequence
  Synthetic
uuuccaugaaaguauuuuucu

SEQ ID NO: 516 - RNA, 21 nt, Artificial Sequence
  Synthetic
uuucugacucuccaacagggu

SEQ ID NO: 517 - RNA, 21 nt, Artificial Sequence
  Synthetic
uuuucugacucuccaacaggg

SEQ ID NO: 518 - RNA, 21 nt, Artificial Sequence
  Synthetic
uuuuucugacucuccaacagg

SEQ ID NO: 519 - RNA, 22 nt, Artificial Sequence
  Synthetic
aaaguauuuuucugacucucca

SEQ ID NO: 520 - RNA, 22 nt, Artificial Sequence
  Synthetic
aaguauuuuucugacucuccaa

SEQ ID NO: 521 - RNA, 22 nt, Artificial Sequence
  Synthetic
acaguacccuguuggagaguca

SEQ ID NO: 522 - RNA, 22 nt, Artificial Sequence
  Synthetic
acccuguuggagagucagaaaa

SEQ ID NO: 523 - RNA, 22 nt, Artificial Sequence
  Synthetic
agagucagaaaaauacuuucau

SEQ ID NO: 524 - RNA, 22 nt, Artificial Sequence
  Synthetic
agguacaguacccuguuggaga

SEQ ID NO: 525 - RNA, 22 nt, Artificial Sequence
  Synthetic
aguacccuguuggagagucaga

SEQ ID NO: 526 - RNA, 22 nt, Artificial Sequence
  Synthetic
aguauuuuucugacucuccaac

SEQ ID NO: 527 - RNA, 22 nt, Artificial Sequence
  Synthetic
agucagaaaaauacuuucaugg

SEQ ID NO: 528 - RNA, 22 nt, Artificial Sequence
  Synthetic
augaaaguauuuuucugacucu

SEQ ID NO: 529 - RNA, 22 nt, Artificial Sequence
  Synthetic
auuuccaugaaaguauuuuucu

SEQ ID NO: 530 - RNA, 22 nt, Artificial Sequence
  Synthetic
auuuuucugacucuccaacagg

SEQ ID NO: 531 - RNA, 22 nt, Artificial Sequence
  Synthetic
cagguacaguacccuguuggag

SEQ ID NO: 532 - RNA, 22 nt, Artificial Sequence
  Synthetic
caguacccuguuggagagucag

SEQ ID NO: 533 - RNA, 22 nt, Artificial Sequence
  Synthetic
caugaaaguauuuuucugacuc

SEQ ID NO: 534 - RNA, 22 nt, Artificial Sequence
  Synthetic
ccaugaaaguauuuuucugacu

SEQ ID NO: 535 - RNA, 22 nt, Artificial Sequence
  Synthetic
cccuguuggagagucagaaaaa

SEQ ID NO: 536 - RNA, 22 nt, Artificial Sequence
  Synthetic
ccuguuggagagucagaaaaau

SEQ ID NO: 537 - RNA, 22 nt, Artificial Sequence
  Synthetic
cugacucuccaacaggguacug

SEQ ID NO: 538 - RNA, 22 nt, Artificial Sequence
  Synthetic
cuguuggagagucagaaaaaua

SEQ ID NO: 539 - RNA, 22 nt, Artificial Sequence
  Synthetic
gaaaguauuuuucugacucucc

SEQ ID NO: 540 - RNA, 22 nt, Artificial Sequence
  Synthetic
gagagucagaaaaauacuuuca

SEQ ID NO: 541 - RNA, 22 nt, Artificial Sequence
  Synthetic
gagucagaaaaauacuuucaug

SEQ ID NO: 542 - RNA, 22 nt, Artificial Sequence
  Synthetic
gauuuccaugaaaguauuuuuc

SEQ ID NO: 543 - RNA, 22 nt, Artificial Sequence
  Synthetic
ggagagucagaaaaauacuuuc

SEQ ID NO: 544 - RNA, 22 nt, Artificial Sequence
  Synthetic
guacccuguuggagagucagaa

SEQ ID NO: 545 - RNA, 22 nt, Artificial Sequence
  Synthetic
guauuuuucugacucuccaaca

SEQ ID NO: 546 - RNA, 22 nt, Artificial Sequence
  Synthetic
gucagaaaaauacuuucaugga

SEQ ID NO: 547 - RNA, 22 nt, Artificial Sequence
  Synthetic
guuggagagucagaaaaauacu

SEQ ID NO: 548 - RNA, 22 nt, Artificial Sequence
  Synthetic
uacaguacccuguuggagaguc

SEQ ID NO: 549 - RNA, 22 nt, Artificial Sequence
  Synthetic
uacccuguuggagagucagaaa

SEQ ID NO: 550 - RNA, 22 nt, Artificial Sequence
  Synthetic
uauuuuucugacucuccaacag

SEQ ID NO: 551 - RNA, 22 nt, Artificial Sequence
  Synthetic
ucagaaaaauacuuucauggaa

SEQ ID NO: 552 - RNA, 22 nt, Artificial Sequence
  Synthetic
uccaugaaaguauuuuucugac

SEQ ID NO: 553 - RNA, 22 nt, Artificial Sequence
  Synthetic
ucugacucuccaacaggguacu

SEQ ID NO: 554 - RNA, 22 nt, Artificial Sequence
  Synthetic
ugaaaguauuuuucugacucuc

SEQ ID NO: 555 - RNA, 22 nt, Artificial Sequence
  Synthetic
ugacucuccaacaggguacugu

SEQ ID NO: 556 - RNA, 22 nt, Artificial Sequence
  Synthetic
uggagagucagaaaaauacuuu

SEQ ID NO: 557 - RNA, 22 nt, Artificial Sequence
  Synthetic
uguuggagagucagaaaaauac

SEQ ID NO: 558 - RNA, 22 nt, Artificial Sequence
  Synthetic
uuccaugaaaguauuuuucuga

SEQ ID NO: 559 - RNA, 22 nt, Artificial Sequence
  Synthetic
uucugacucuccaacaggguac

SEQ ID NO: 560 - RNA, 22 nt, Artificial Sequence
  Synthetic
uuggagagucagaaaaauacuu

SEQ ID NO: 561 - RNA, 22 nt, Artificial Sequence
  Synthetic
uuuccaugaaaguauuuuucug

SEQ ID NO: 562 - RNA, 22 nt, Artificial Sequence
  Synthetic
uuucugacucuccaacagggua

SEQ ID NO: 563 - RNA, 22 nt, Artificial Sequence
  Synthetic
uuuucugacucuccaacagggu

SEQ ID NO: 564 - RNA, 22 nt, Artificial Sequence
  Synthetic
uuuuucugacucuccaacaggg

SEQ ID NO: 565 - RNA, 20 nt, Artificial Sequence
  Synthetic
aacucuaucaagugagcguc

SEQ ID NO: 566 - RNA, 20 nt, Artificial Sequence
  Synthetic
aagugagcguccuguguccu

SEQ ID NO: 567 - RNA, 20 nt, Artificial Sequence
  Synthetic
acacaggacgcucacuugau

SEQ ID NO: 568 - RNA, 20 nt, Artificial Sequence
  Synthetic
acaggacgcucacuugauag

SEQ ID NO: 569 - RNA, 20 nt, Artificial Sequence
  Synthetic
accugggaggacacaggacg

SEQ ID NO: 570 - RNA, 20 nt, Artificial Sequence
  Synthetic
acgcucacuugauagaguuc

SEQ ID NO: 571 - RNA, 20 nt, Artificial Sequence
  Synthetic
acucuaucaagugagcgucc

SEQ ID NO: 572 - RNA, 20 nt, Artificial Sequence
  Synthetic
agcguccuguguccucccag

SEQ ID NO: 573 - RNA, 20 nt, Artificial Sequence
  Synthetic
aggacacaggacgcucacuu

SEQ ID NO: 574 - RNA, 20 nt, Artificial Sequence
  Synthetic
aggacgcucacuugauagag

SEQ ID NO: 575 - RNA, 20 nt, Artificial Sequence
  Synthetic
agugagcguccuguguccuc

SEQ ID NO: 576 - RNA, 20 nt, Artificial Sequence
  Synthetic
aucaagugagcguccugugu

SEQ ID NO: 577 - RNA, 20 nt, Artificial Sequence
  Synthetic
augaacucuaucaagugagc

SEQ ID NO: 578 - RNA, 20 nt, Artificial Sequence
  Synthetic
caagugagcguccugugucc

SEQ ID NO: 579 - RNA, 20 nt, Artificial Sequence
  Synthetic
cacaggacgcucacuugaua

SEQ ID NO: 580 - RNA, 20 nt, Artificial Sequence
  Synthetic
caggacgcucacuugauaga

SEQ ID NO: 581 - RNA, 20 nt, Artificial Sequence
  Synthetic
caugaacucuaucaagugag

SEQ ID NO: 582 - RNA, 20 nt, Artificial Sequence
  Synthetic
ccaugaacucuaucaaguga

SEQ ID NO: 583 - RNA, 20 nt, Artificial Sequence
  Synthetic
ccugggaggacacaggacgc

SEQ ID NO: 584 - RNA, 20 nt, Artificial Sequence
  Synthetic
cgcucacuugauagaguuca

SEQ ID NO: 585 - RNA, 20 nt, Artificial Sequence
  Synthetic
cuaucaagugagcguccugu

SEQ ID NO: 586 - RNA, 20 nt, Artificial Sequence
  Synthetic
cucuaucaagugagcguccu

SEQ ID NO: 587 - RNA, 20 nt, Artificial Sequence
  Synthetic
cugggaggacacaggacgcu

SEQ ID NO: 588 - RNA, 20 nt, Artificial Sequence
  Synthetic
gaacucuaucaagugagcgu

SEQ ID NO: 589 - RNA, 20 nt, Artificial Sequence
  Synthetic
gacacaggacgcucacuuga

SEQ ID NO: 590 - RNA, 20 nt, Artificial Sequence
  Synthetic
gaccugggaggacacaggac

SEQ ID NO: 591 - RNA, 20 nt, Artificial Sequence
  Synthetic
gacgcucacuugauagaguu

SEQ ID NO: 592 - RNA, 20 nt, Artificial Sequence
  Synthetic
gagcguccuguguccuccca

SEQ ID NO: 593 - RNA, 20 nt, Artificial Sequence
  Synthetic
gaggacacaggacgcucacu

SEQ ID NO: 594 - RNA, 20 nt, Artificial Sequence
  Synthetic
gccaugaacucuaucaagug

SEQ ID NO: 595 - RNA, 20 nt, Artificial Sequence
  Synthetic
gcguccuguguccucccagg

SEQ ID NO: 596 - RNA, 20 nt, Artificial Sequence
  Synthetic
ggacacaggacgcucacuug

SEQ ID NO: 597 - RNA, 20 nt, Artificial Sequence
  Synthetic
ggaccugggaggacacagga

SEQ ID NO: 598 - RNA, 20 nt, Artificial Sequence
  Synthetic
ggacgcucacuugauagagu

SEQ ID NO: 599 - RNA, 20 nt, Artificial Sequence
  Synthetic
ggaggacacaggacgcucac

SEQ ID NO: 600 - RNA, 20 nt, Artificial Sequence
  Synthetic
ggccaugaacucuaucaagu

SEQ ID NO: 601 - RNA, 20 nt, Artificial Sequence
  Synthetic
gggaccugggaggacacagg

SEQ ID NO: 602 - RNA, 20 nt, Artificial Sequence
  Synthetic
gggaggacacaggacgcuca

SEQ ID NO: 603 - RNA, 20 nt, Artificial Sequence
  Synthetic
ggggaccugggaggacacag

SEQ ID NO: 604 - RNA, 20 nt, Artificial Sequence
  Synthetic
gugagcguccuguguccucc

SEQ ID NO: 605 - RNA, 20 nt, Artificial Sequence
  Synthetic
uaucaagugagcguccugug

SEQ ID NO: 606 - RNA, 20 nt, Artificial Sequence
  Synthetic
ucaagugagcguccuguguc

SEQ ID NO: 607 - RNA, 20 nt, Artificial Sequence
  Synthetic
ucuaucaagugagcguccug

SEQ ID NO: 608 - RNA, 20 nt, Artificial Sequence
  Synthetic
ugaacucuaucaagugagcg

SEQ ID NO: 609 - RNA, 20 nt, Artificial Sequence
  Synthetic
ugagcguccuguguccuccc

SEQ ID NO: 610 - RNA, 20 nt, Artificial Sequence
  Synthetic
ugggaggacacaggacgcuc

SEQ ID NO: 611 - RNA, 21 nt, Artificial Sequence
  Synthetic
aacucuaucaagugagcgucc

SEQ ID NO: 612 - RNA, 21 nt, Artificial Sequence
  Synthetic
aagugagcguccuguguccuc

SEQ ID NO: 613 - RNA, 21 nt, Artificial Sequence
  Synthetic
acacaggacgcucacuugaua

SEQ ID NO: 614 - RNA, 21 nt, Artificial Sequence
  Synthetic
acaggacgcucacuugauaga

SEQ ID NO: 615 - RNA, 21 nt, Artificial Sequence
  Synthetic
accugggaggacacaggacgc

SEQ ID NO: 616 - RNA, 21 nt, Artificial Sequence
  Synthetic
acgcucacuugauagaguuca

SEQ ID NO: 617 - RNA, 21 nt, Artificial Sequence
  Synthetic
acucuaucaagugagcguccu

SEQ ID NO: 618 - RNA, 21 nt, Artificial Sequence
  Synthetic
agcguccuguguccucccagg

SEQ ID NO: 619 - RNA, 21 nt, Artificial Sequence
  Synthetic
aggacacaggacgcucacuug

SEQ ID NO: 620 - RNA, 21 nt, Artificial Sequence
  Synthetic
aggacgcucacuugauagagu

SEQ ID NO: 621 - RNA, 21 nt, Artificial Sequence
  Synthetic
agugagcguccuguguccucc

SEQ ID NO: 622 - RNA, 21 nt, Artificial Sequence
  Synthetic
aucaagugagcguccuguguc

SEQ ID NO: 623 - RNA, 21 nt, Artificial Sequence
  Synthetic
augaacucuaucaagugagcg

SEQ ID NO: 624 - RNA, 21 nt, Artificial Sequence
  Synthetic
caagugagcguccuguguccu

SEQ ID NO: 625 - RNA, 21 nt, Artificial Sequence
  Synthetic
cacaggacgcucacuugauag

SEQ ID NO: 626 - RNA, 21 nt, Artificial Sequence
  Synthetic
caggacgcucacuugauagag

SEQ ID NO: 627 - RNA, 21 nt, Artificial Sequence
  Synthetic
caugaacucuaucaagugagc

SEQ ID NO: 628 - RNA, 21 nt, Artificial Sequence
  Synthetic
ccaugaacucuaucaagugag

SEQ ID NO: 629 - RNA, 21 nt, Artificial Sequence
  Synthetic
ccugggaggacacaggacgcu

SEQ ID NO: 630 - RNA, 21 nt, Artificial Sequence
  Synthetic
cgcucacuugauagaguucau

SEQ ID NO: 631 - RNA, 21 nt, Artificial Sequence
  Synthetic
cuaucaagugagcguccugug

SEQ ID NO: 632 - RNA, 21 nt, Artificial Sequence
  Synthetic
cucuaucaagugagcguccug

SEQ ID NO: 633 - RNA, 21 nt, Artificial Sequence
  Synthetic
cugggaggacacaggacgcuc

SEQ ID NO: 634 - RNA, 21 nt, Artificial Sequence
  Synthetic
gaacucuaucaagugagcguc

SEQ ID NO: 635 - RNA, 21 nt, Artificial Sequence
  Synthetic
gacacaggacgcucacuugau

SEQ ID NO: 636 - RNA, 21 nt, Artificial Sequence
  Synthetic
gaccugggaggacacaggacg

SEQ ID NO: 637 - RNA, 21 nt, Artificial Sequence
  Synthetic
gacgcucacuugauagaguuc

SEQ ID NO: 638 - RNA, 21 nt, Artificial Sequence
  Synthetic
gagcguccuguguccucccag

SEQ ID NO: 639 - RNA, 21 nt, Artificial Sequence
  Synthetic
gaggacacaggacgcucacuu

SEQ ID NO: 640 - RNA, 21 nt, Artificial Sequence
  Synthetic
gccaugaacucuaucaaguga

SEQ ID NO: 641 - RNA, 21 nt, Artificial Sequence
  Synthetic
gcguccuguguccucccaggu

SEQ ID NO: 642 - RNA, 21 nt, Artificial Sequence
  Synthetic
ggacacaggacgcucacuuga

SEQ ID NO: 643 - RNA, 21 nt, Artificial Sequence
  Synthetic
ggaccugggaggacacaggac

SEQ ID NO: 644 - RNA, 21 nt, Artificial Sequence
  Synthetic
ggacgcucacuugauagaguu

SEQ ID NO: 645 - RNA, 21 nt, Artificial Sequence
  Synthetic
ggaggacacaggacgcucacu

SEQ ID NO: 646 - RNA, 21 nt, Artificial Sequence
  Synthetic
ggccaugaacucuaucaagug

SEQ ID NO: 647 - RNA, 21 nt, Artificial Sequence
  Synthetic
gggaccugggaggacacagga

SEQ ID NO: 648 - RNA, 21 nt, Artificial Sequence
  Synthetic
gggaggacacaggacgcucac

SEQ ID NO: 649 - RNA, 21 nt, Artificial Sequence
  Synthetic
ggggaccugggaggacacagg

SEQ ID NO: 650 - RNA, 21 nt, Artificial Sequence
  Synthetic
gggggaccugggaggacacag

SEQ ID NO: 651 - RNA, 21 nt, Artificial Sequence
  Synthetic
gugagcguccuguguccuccc

SEQ ID NO: 652 - RNA, 21 nt, Artificial Sequence
  Synthetic
uaucaagugagcguccugugu

SEQ ID NO: 653 - RNA, 21 nt, Artificial Sequence
  Synthetic
ucaagugagcguccugugucc

SEQ ID NO: 654 - RNA, 21 nt, Artificial Sequence
  Synthetic
ucuaucaagugagcguccugu

SEQ ID NO: 655 - RNA, 21 nt, Artificial Sequence
  Synthetic
ugaacucuaucaagugagcgu

SEQ ID NO: 656 - RNA, 21 nt, Artificial Sequence
  Synthetic
ugagcguccuguguccuccca

SEQ ID NO: 657 - RNA, 21 nt, Artificial Sequence
  Synthetic
uggccaugaacucuaucaagu

SEQ ID NO: 658 - RNA, 21 nt, Artificial Sequence
  Synthetic
ugggaggacacaggacgcuca

SEQ ID NO: 659 - RNA, 22 nt, Artificial Sequence
  Synthetic
aacucuaucaagugagcguccu

SEQ ID NO: 660 - RNA, 22 nt, Artificial Sequence
  Synthetic
aagugagcguccuguguccucc

SEQ ID NO: 661 - RNA, 22 nt, Artificial Sequence
  Synthetic
acacaggacgcucacuugauag

SEQ ID NO: 662 - RNA, 22 nt, Artificial Sequence
  Synthetic
acaggacgcucacuugauagag

SEQ ID NO: 663 - RNA, 22 nt, Artificial Sequence
  Synthetic
accugggaggacacaggacgcu

SEQ ID NO: 664 - RNA, 22 nt, Artificial Sequence
  Synthetic
acgcucacuugauagaguucau

SEQ ID NO: 665 - RNA, 22 nt, Artificial Sequence
  Synthetic
acucuaucaagugagcguccug

SEQ ID NO: 666 - RNA, 22 nt, Artificial Sequence
  Synthetic
agcguccuguguccucccaggu

SEQ ID NO: 667 - RNA, 22 nt, Artificial Sequence
  Synthetic
aggacacaggacgcucacuuga

SEQ ID NO: 668 - RNA, 22 nt, Artificial Sequence
  Synthetic
aggacgcucacuugauagaguu

SEQ ID NO: 669 - RNA, 22 nt, Artificial Sequence
  Synthetic
agugagcguccuguguccuccc

SEQ ID NO: 670 - RNA, 22 nt, Artificial Sequence
  Synthetic
aucaagugagcguccugugucc

SEQ ID NO: 671 - RNA, 22 nt, Artificial Sequence
  Synthetic
augaacucuaucaagugagcgu

SEQ ID NO: 672 - RNA, 22 nt, Artificial Sequence
  Synthetic
caagugagcguccuguguccuc

SEQ ID NO: 673 - RNA, 22 nt, Artificial Sequence
  Synthetic
cacaggacgcucacuugauaga

SEQ ID NO: 674 - RNA, 22 nt, Artificial Sequence
  Synthetic
caggacgcucacuugauagagu

SEQ ID NO: 675 - RNA, 22 nt, Artificial Sequence
  Synthetic
caugaacucuaucaagugagcg

SEQ ID NO: 676 - RNA, 22 nt, Artificial Sequence
  Synthetic
ccaugaacucuaucaagugagc

SEQ ID NO: 677 - RNA, 22 nt, Artificial Sequence
  Synthetic
ccugggaggacacaggacgcuc

SEQ ID NO: 678 - RNA, 22 nt, Artificial Sequence
  Synthetic
cgcucacuugauagaguucaug

SEQ ID NO: 679 - RNA, 22 nt, Artificial Sequence
  Synthetic
cgggggaccugggaggacacag

SEQ ID NO: 680 - RNA, 22 nt, Artificial Sequence
  Synthetic
cuaucaagugagcguccugugu

SEQ ID NO: 681 - RNA, 22 nt, Artificial Sequence
  Synthetic
cucuaucaagugagcguccugu

SEQ ID NO: 682 - RNA, 22 nt, Artificial Sequence
  Synthetic
cuggccaugaacucuaucaagu

SEQ ID NO: 683 - RNA, 22 nt, Artificial Sequence
  Synthetic
cugggaggacacaggacgcuca

SEQ ID NO: 684 - RNA, 22 nt, Artificial Sequence
  Synthetic
gaacucuaucaagugagcgucc

SEQ ID NO: 685 - RNA, 22 nt, Artificial Sequence
  Synthetic
gacacaggacgcucacuugaua

SEQ ID NO: 686 - RNA, 22 nt, Artificial Sequence
  Synthetic
gaccugggaggacacaggacgc

SEQ ID NO: 687 - RNA, 22 nt, Artificial Sequence
  Synthetic
gacgcucacuugauagaguuca

SEQ ID NO: 688 - RNA, 22 nt, Artificial Sequence
  Synthetic
gagcguccuguguccucccagg

SEQ ID NO: 689 - RNA, 22 nt, Artificial Sequence
  Synthetic
gaggacacaggacgcucacuug

SEQ ID NO: 690 - RNA, 22 nt, Artificial Sequence
  Synthetic
gccaugaacucuaucaagugag

SEQ ID NO: 691 - RNA, 22 nt, Artificial Sequence
  Synthetic
gcguccuguguccucccagguc

SEQ ID NO: 692 - RNA, 22 nt, Artificial Sequence
  Synthetic
ggacacaggacgcucacuugau

SEQ ID NO: 693 - RNA, 22 nt, Artificial Sequence
  Synthetic
ggaccugggaggacacaggacg

SEQ ID NO: 694 - RNA, 22 nt, Artificial Sequence
  Synthetic
ggacgcucacuugauagaguuc

SEQ ID NO: 695 - RNA, 22 nt, Artificial Sequence
  Synthetic
ggaggacacaggacgcucacuu

SEQ ID NO: 696 - RNA, 22 nt, Artificial Sequence
  Synthetic
ggccaugaacucuaucaaguga

SEQ ID NO: 697 - RNA, 22 nt, Artificial Sequence
  Synthetic
gggaccugggaggacacaggac

SEQ ID NO: 698 - RNA, 22 nt, Artificial Sequence
  Synthetic
gggaggacacaggacgcucacu

SEQ ID NO: 699 - RNA, 22 nt, Artificial Sequence
  Synthetic
ggggaccugggaggacacagga

SEQ ID NO: 700 - RNA, 22 nt, Artificial Sequence
  Synthetic
gggggaccugggaggacacagg

SEQ ID NO: 701 - RNA, 22 nt, Artificial Sequence
  Synthetic
gugagcguccuguguccuccca

SEQ ID NO: 702 - RNA, 22 nt, Artificial Sequence
  Synthetic
uaucaagugagcguccuguguc

SEQ ID NO: 703 - RNA, 22 nt, Artificial Sequence
  Synthetic
ucaagugagcguccuguguccu

SEQ ID NO: 704 - RNA, 22 nt, Artificial Sequence
  Synthetic
ucuaucaagugagcguccugug

SEQ ID NO: 705 - RNA, 22 nt, Artificial Sequence
  Synthetic
ugaacucuaucaagugagcguc

SEQ ID NO: 706 - RNA, 22 nt, Artificial Sequence
  Synthetic
ugagcguccuguguccucccag

SEQ ID NO: 707 - RNA, 22 nt, Artificial Sequence
  Synthetic
uggccaugaacucuaucaagug

SEQ ID NO: 708 - RNA, 22 nt, Artificial Sequence
  Synthetic
ugggaggacacaggacgcucac

SEQ ID NO: 709 - RNA, 20 nt, Artificial Sequence
  Synthetic
aaacagauggccaugaacuc

SEQ ID NO: 710 - RNA, 20 nt, Artificial Sequence
  Synthetic
aacagauggccaugaacucu

SEQ ID NO: 711 - RNA, 20 nt, Artificial Sequence
  Synthetic
acagauggccaugaacucua

SEQ ID NO: 712 - RNA, 20 nt, Artificial Sequence
  Synthetic
acccucaaacagauggccau

SEQ ID NO: 713 - RNA, 20 nt, Artificial Sequence
  Synthetic
accugaggacccucaaacag

SEQ ID NO: 714 - RNA, 20 nt, Artificial Sequence
  Synthetic
acuugauagaguucauggcc

SEQ ID NO: 715 - RNA, 20 nt, Artificial Sequence
  Synthetic
agaguucauggccaucuguu

SEQ ID NO: 716 - RNA, 20 nt, Artificial Sequence
  Synthetic
agauggccaugaacucuauc

SEQ ID NO: 717 - RNA, 20 nt, Artificial Sequence
  Synthetic
aggacccucaaacagauggc

SEQ ID NO: 718 - RNA, 20 nt, Artificial Sequence
  Synthetic
aguucauggccaucuguuug

SEQ ID NO: 719 - RNA, 20 nt, Artificial Sequence
  Synthetic
auagaguucauggccaucug

SEQ ID NO: 720 - RNA, 20 nt, Artificial Sequence
  Synthetic
aucuguuugaggguccucag

SEQ ID NO: 721 - RNA, 20 nt, Artificial Sequence
  Synthetic
auggccaucuguuugagggu

SEQ ID NO: 722 - RNA, 20 nt, Artificial Sequence
  Synthetic
caaacagauggccaugaacu

SEQ ID NO: 723 - RNA, 20 nt, Artificial Sequence
  Synthetic
cacuugauagaguucauggc

SEQ ID NO: 724 - RNA, 20 nt, Artificial Sequence
  Synthetic
cagauggccaugaacucuau

SEQ ID NO: 725 - RNA, 20 nt, Artificial Sequence
  Synthetic
caucuguuugaggguccuca

SEQ ID NO: 726 - RNA, 20 nt, Artificial Sequence
  Synthetic
cauggccaucuguuugaggg

SEQ ID NO: 727 - RNA, 20 nt, Artificial Sequence
  Synthetic
ccaucuguuugaggguccuc

SEQ ID NO: 728 - RNA, 20 nt, Artificial Sequence
  Synthetic
cccucaaacagauggccaug

SEQ ID NO: 729 - RNA, 20 nt, Artificial Sequence
  Synthetic
ccucaaacagauggccauga

SEQ ID NO: 730 - RNA, 20 nt, Artificial Sequence
  Synthetic
ccugaggacccucaaacaga

SEQ ID NO: 731 - RNA, 20 nt, Artificial Sequence
  Synthetic
cucaaacagauggccaugaa

SEQ ID NO: 732 - RNA, 20 nt, Artificial Sequence
  Synthetic
cugaccugaggacccucaaa

SEQ ID NO: 733 - RNA, 20 nt, Artificial Sequence
  Synthetic
cugaggacccucaaacagau

SEQ ID NO: 734 - RNA, 20 nt, Artificial Sequence
  Synthetic
cuugauagaguucauggcca

SEQ ID NO: 735 - RNA, 20 nt, Artificial Sequence
  Synthetic
gacccucaaacagauggcca

SEQ ID NO: 736 - RNA, 20 nt, Artificial Sequence
  Synthetic
gaccugaggacccucaaaca

SEQ ID NO: 737 - RNA, 20 nt, Artificial Sequence
  Synthetic
gaggacccucaaacagaugg

SEQ ID NO: 738 - RNA, 20 nt, Artificial Sequence
  Synthetic
gaguucauggccaucuguuu

SEQ ID NO: 739 - RNA, 20 nt, Artificial Sequence
  Synthetic
gauagaguucauggccaucu

SEQ ID NO: 740 - RNA, 20 nt, Artificial Sequence
  Synthetic
gauggccaugaacucuauca

SEQ ID NO: 741 - RNA, 20 nt, Artificial Sequence
  Synthetic
gccaucuguuugaggguccu

SEQ ID NO: 742 - RNA, 20 nt, Artificial Sequence
  Synthetic
ggacccucaaacagauggcc

SEQ ID NO: 743 - RNA, 20 nt, Artificial Sequence
  Synthetic
ggccaucuguuugagggucc

SEQ ID NO: 744 - RNA, 20 nt, Artificial Sequence
  Synthetic
guucauggccaucuguuuga

SEQ ID NO: 745 - RNA, 20 nt, Artificial Sequence
  Synthetic
uagaguucauggccaucugu

SEQ ID NO: 746 - RNA, 20 nt, Artificial Sequence
  Synthetic
ucaaacagauggccaugaac

SEQ ID NO: 747 - RNA, 20 nt, Artificial Sequence
  Synthetic
ucacuugauagaguucaugg

SEQ ID NO: 748 - RNA, 20 nt, Artificial Sequence
  Synthetic
ucauggccaucuguuugagg

SEQ ID NO: 749 - RNA, 20 nt, Artificial Sequence
  Synthetic
ugaccugaggacccucaaac

SEQ ID NO: 750 - RNA, 20 nt, Artificial Sequence
  Synthetic
ugaggacccucaaacagaug

SEQ ID NO: 751 - RNA, 20 nt, Artificial Sequence
  Synthetic
ugauagaguucauggccauc

SEQ ID NO: 752 - RNA, 20 nt, Artificial Sequence
  Synthetic
uggccaucuguuugaggguc

SEQ ID NO: 753 - RNA, 20 nt, Artificial Sequence
  Synthetic
uucauggccaucuguuugag

SEQ ID NO: 754 - RNA, 20 nt, Artificial Sequence
  Synthetic
uugauagaguucauggccau

SEQ ID NO: 755 - RNA, 21 nt, Artificial Sequence
  Synthetic
aaacagauggccaugaacucu

SEQ ID NO: 756 - RNA, 21 nt, Artificial Sequence
  Synthetic
aacagauggccaugaacucua

SEQ ID NO: 757 - RNA, 21 nt, Artificial Sequence
  Synthetic
acagauggccaugaacucuau

SEQ ID NO: 758 - RNA, 21 nt, Artificial Sequence
  Synthetic
acccucaaacagauggccaug

SEQ ID NO: 759 - RNA, 21 nt, Artificial Sequence
  Synthetic
accugaggacccucaaacaga

SEQ ID NO: 760 - RNA, 21 nt, Artificial Sequence
  Synthetic
acuugauagaguucauggcca

SEQ ID NO: 761 - RNA, 21 nt, Artificial Sequence
  Synthetic
agaguucauggccaucuguuu

SEQ ID NO: 762 - RNA, 21 nt, Artificial Sequence
  Synthetic
agauggccaugaacucuauca

SEQ ID NO: 763 - RNA, 21 nt, Artificial Sequence
  Synthetic
aggacccucaaacagauggcc

SEQ ID NO: 764 - RNA, 21 nt, Artificial Sequence
  Synthetic
aguucauggccaucuguuuga

SEQ ID NO: 765 - RNA, 21 nt, Artificial Sequence
  Synthetic
auagaguucauggccaucugu

SEQ ID NO: 766 - RNA, 21 nt, Artificial Sequence
  Synthetic
aucuguuugaggguccucagg

SEQ ID NO: 767 - RNA, 21 nt, Artificial Sequence
  Synthetic
auggccaucuguuugaggguc

SEQ ID NO: 768 - RNA, 21 nt, Artificial Sequence
  Synthetic
caaacagauggccaugaacuc

SEQ ID NO: 769 - RNA, 21 nt, Artificial Sequence
  Synthetic
cacuugauagaguucauggcc

SEQ ID NO: 770 - RNA, 21 nt, Artificial Sequence
  Synthetic
cagauggccaugaacucuauc

SEQ ID NO: 771 - RNA, 21 nt, Artificial Sequence
  Synthetic
caucuguuugaggguccucag

SEQ ID NO: 772 - RNA, 21 nt, Artificial Sequence
  Synthetic
cauggccaucuguuugagggu

SEQ ID NO: 773 - RNA, 21 nt, Artificial Sequence
  Synthetic
ccaucuguuugaggguccuca

SEQ ID NO: 774 - RNA, 21 nt, Artificial Sequence
  Synthetic
cccucaaacagauggccauga

SEQ ID NO: 775 - RNA, 21 nt, Artificial Sequence
  Synthetic
ccucaaacagauggccaugaa

SEQ ID NO: 776 - RNA, 21 nt, Artificial Sequence
  Synthetic
ccugaggacccucaaacagau

SEQ ID NO: 777 - RNA, 21 nt, Artificial Sequence
  Synthetic
cucaaacagauggccaugaac

SEQ ID NO: 778 - RNA, 21 nt, Artificial Sequence
  Synthetic
cucacuugauagaguucaugg

SEQ ID NO: 779 - RNA, 21 nt, Artificial Sequence
  Synthetic
cugaccugaggacccucaaac

SEQ ID NO: 780 - RNA, 21 nt, Artificial Sequence
  Synthetic
cugaggacccucaaacagaug

SEQ ID NO: 781 - RNA, 21 nt, Artificial Sequence
  Synthetic
cuugauagaguucauggccau

SEQ ID NO: 782 - RNA, 21 nt, Artificial Sequence
  Synthetic
gacccucaaacagauggccau

SEQ ID NO: 783 - RNA, 21 nt, Artificial Sequence
  Synthetic
gaccugaggacccucaaacag

SEQ ID NO: 784 - RNA, 21 nt, Artificial Sequence
  Synthetic
gaggacccucaaacagauggc

SEQ ID NO: 785 - RNA, 21 nt, Artificial Sequence
  Synthetic
gaguucauggccaucuguuug

SEQ ID NO: 786 - RNA, 21 nt, Artificial Sequence
  Synthetic
gauagaguucauggccaucug

SEQ ID NO: 787 - RNA, 21 nt, Artificial Sequence
  Synthetic
gauggccaugaacucuaucaa

SEQ ID NO: 788 - RNA, 21 nt, Artificial Sequence
  Synthetic
gccaucuguuugaggguccuc

SEQ ID NO: 789 - RNA, 21 nt, Artificial Sequence
  Synthetic
gcugaccugaggacccucaaa

SEQ ID NO: 790 - RNA, 21 nt, Artificial Sequence
  Synthetic
ggacccucaaacagauggcca

SEQ ID NO: 791 - RNA, 21 nt, Artificial Sequence
  Synthetic
ggccaucuguuugaggguccu

SEQ ID NO: 792 - RNA, 21 nt, Artificial Sequence
  Synthetic
guucauggccaucuguuugag

SEQ ID NO: 793 - RNA, 21 nt, Artificial Sequence
  Synthetic
uagaguucauggccaucuguu

SEQ ID NO: 794 - RNA, 21 nt, Artificial Sequence
  Synthetic
ucaaacagauggccaugaacu

SEQ ID NO: 795 - RNA, 21 nt, Artificial Sequence
  Synthetic
ucacuugauagaguucauggc

SEQ ID NO: 796 - RNA, 21 nt, Artificial Sequence
  Synthetic
ucauggccaucuguuugaggg

SEQ ID NO: 797 - RNA, 21 nt, Artificial Sequence
  Synthetic
ugaccugaggacccucaaaca

SEQ ID NO: 798 - RNA, 21 nt, Artificial Sequence
  Synthetic
ugaggacccucaaacagaugg

SEQ ID NO: 799 - RNA, 21 nt, Artificial Sequence
  Synthetic
ugauagaguucauggccaucu

SEQ ID NO: 800 - RNA, 21 nt, Artificial Sequence
  Synthetic
uggccaucuguuugagggucc

SEQ ID NO: 801 - RNA, 21 nt, Artificial Sequence
  Synthetic
uucauggccaucuguuugagg

SEQ ID NO: 802 - RNA, 21 nt, Artificial Sequence
  Synthetic
uugauagaguucauggccauc

SEQ ID NO: 803 - RNA, 22 nt, Artificial Sequence
  Synthetic
aaacagauggccaugaacucua

SEQ ID NO: 804 - RNA, 22 nt, Artificial Sequence
  Synthetic
aacagauggccaugaacucuau

SEQ ID NO: 805 - RNA, 22 nt, Artificial Sequence
  Synthetic
acagauggccaugaacucuauc

SEQ ID NO: 806 - RNA, 22 nt, Artificial Sequence
  Synthetic
acccucaaacagauggccauga

SEQ ID NO: 807 - RNA, 22 nt, Artificial Sequence
  Synthetic
accugaggacccucaaacagau

SEQ ID NO: 808 - RNA, 22 nt, Artificial Sequence
  Synthetic
acucacuugauagaguucaugg

SEQ ID NO: 809 - RNA, 22 nt, Artificial Sequence
  Synthetic
acuugauagaguucauggccau

SEQ ID NO: 810 - RNA, 22 nt, Artificial Sequence
  Synthetic
agaguucauggccaucuguuug

SEQ ID NO: 811 - RNA, 22 nt, Artificial Sequence
  Synthetic
agauggccaugaacucuaucaa

SEQ ID NO: 812 - RNA, 22 nt, Artificial Sequence
  Synthetic
aggacccucaaacagauggcca

SEQ ID NO: 813 - RNA, 22 nt, Artificial Sequence
  Synthetic
aguucauggccaucuguuugag

SEQ ID NO: 814 - RNA, 22 nt, Artificial Sequence
  Synthetic
auagaguucauggccaucuguu

SEQ ID NO: 815 - RNA, 22 nt, Artificial Sequence
  Synthetic
aucuguuugaggguccucaggu

SEQ ID NO: 816 - RNA, 22 nt, Artificial Sequence
  Synthetic
auggccaucuguuugagggucc

SEQ ID NO: 817 - RNA, 22 nt, Artificial Sequence
  Synthetic
caaacagauggccaugaacucu

SEQ ID NO: 818 - RNA, 22 nt, Artificial Sequence
  Synthetic
cacuugauagaguucauggcca

SEQ ID NO: 819 - RNA, 22 nt, Artificial Sequence
  Synthetic
cagauggccaugaacucuauca

SEQ ID NO: 820 - RNA, 22 nt, Artificial Sequence
  Synthetic
caucuguuugaggguccucagg

SEQ ID NO: 821 - RNA, 22 nt, Artificial Sequence
  Synthetic
cauggccaucuguuugaggguc

SEQ ID NO: 822 - RNA, 22 nt, Artificial Sequence
  Synthetic
ccaucuguuugaggguccucag

SEQ ID NO: 823 - RNA, 22 nt, Artificial Sequence
  Synthetic
cccucaaacagauggccaugaa

SEQ ID NO: 824 - RNA, 22 nt, Artificial Sequence
  Synthetic
ccucaaacagauggccaugaac

SEQ ID NO: 825 - RNA, 22 nt, Artificial Sequence
  Synthetic
ccugaggacccucaaacagaug

SEQ ID NO: 826 - RNA, 22 nt, Artificial Sequence
  Synthetic
cucaaacagauggccaugaacu

SEQ ID NO: 827 - RNA, 22 nt, Artificial Sequence
  Synthetic
cucacuugauagaguucauggc

SEQ ID NO: 828 - RNA, 22 nt, Artificial Sequence
  Synthetic
cugaccugaggacccucaaaca

SEQ ID NO: 829 - RNA, 22 nt, Artificial Sequence
  Synthetic
cugaggacccucaaacagaugg

SEQ ID NO: 830 - RNA, 22 nt, Artificial Sequence
  Synthetic
cuugauagaguucauggccauc

SEQ ID NO: 831 - RNA, 22 nt, Artificial Sequence
  Synthetic
gacccucaaacagauggccaug

SEQ ID NO: 832 - RNA, 22 nt, Artificial Sequence
  Synthetic
gaccugaggacccucaaacaga

SEQ ID NO: 833 - RNA, 22 nt, Artificial Sequence
  Synthetic
gaggacccucaaacagauggcc

SEQ ID NO: 834 - RNA, 22 nt, Artificial Sequence
  Synthetic
gaguucauggccaucuguuuga

SEQ ID NO: 835 - RNA, 22 nt, Artificial Sequence
  Synthetic
gauagaguucauggccaucugu

SEQ ID NO: 836 - RNA, 22 nt, Artificial Sequence
  Synthetic
gauggccaugaacucuaucaag

SEQ ID NO: 837 - RNA, 22 nt, Artificial Sequence
  Synthetic
gccaucuguuugaggguccuca

SEQ ID NO: 838 - RNA, 22 nt, Artificial Sequence
  Synthetic
gcugaccugaggacccucaaac

SEQ ID NO: 839 - RNA, 22 nt, Artificial Sequence
  Synthetic
ggacccucaaacagauggccau

SEQ ID NO: 840 - RNA, 22 nt, Artificial Sequence
  Synthetic
ggccaucuguuugaggguccuc

SEQ ID NO: 841 - RNA, 22 nt, Artificial Sequence
  Synthetic
ggcugaccugaggacccucaaa

SEQ ID NO: 842 - RNA, 22 nt, Artificial Sequence
  Synthetic
guucauggccaucuguuugagg

SEQ ID NO: 843 - RNA, 22 nt, Artificial Sequence
  Synthetic
uagaguucauggccaucuguuu

SEQ ID NO: 844 - RNA, 22 nt, Artificial Sequence
  Synthetic
ucaaacagauggccaugaacuc

SEQ ID NO: 845 - RNA, 22 nt, Artificial Sequence
  Synthetic
ucacuugauagaguucauggcc

SEQ ID NO: 846 - RNA, 22 nt, Artificial Sequence
  Synthetic
ucauggccaucuguuugagggu

SEQ ID NO: 847 - RNA, 22 nt, Artificial Sequence
  Synthetic
ugaccugaggacccucaaacag

SEQ ID NO: 848 - RNA, 22 nt, Artificial Sequence
  Synthetic
ugaggacccucaaacagauggc

SEQ ID NO: 849 - RNA, 22 nt, Artificial Sequence
  Synthetic
ugauagaguucauggccaucug

SEQ ID NO: 850 - RNA, 22 nt, Artificial Sequence
  Synthetic
uggccaucuguuugaggguccu

SEQ ID NO: 851 - RNA, 22 nt, Artificial Sequence
  Synthetic
uucauggccaucuguuugaggg

SEQ ID NO: 852 - RNA, 22 nt, Artificial Sequence
  Synthetic
uugauagaguucauggccaucu

SEQ ID NO: 853 - RNA, 20 nt, Artificial Sequence
  Synthetic
acuggggggaugaaggcuga

SEQ ID NO: 854 - RNA, 20 nt, Artificial Sequence
  Synthetic
agccuucauccccccagugc

SEQ ID NO: 855 - RNA, 20 nt, Artificial Sequence
  Synthetic
aggucagccuucaucccccc

SEQ ID NO: 856 - RNA, 20 nt, Artificial Sequence
  Synthetic
aggucuucaugggcacuggg

SEQ ID NO: 857 - RNA, 20 nt, Artificial Sequence
  Synthetic
agugcccaugaagaccucau

SEQ ID NO: 858 - RNA, 20 nt, Artificial Sequence
  Synthetic
auccccccagugcccaugaa

SEQ ID NO: 859 - RNA, 20 nt, Artificial Sequence
  Synthetic
augaggucuucaugggcacu

SEQ ID NO: 860 - RNA, 20 nt, Artificial Sequence
  Synthetic
augggcacuggggggaugaa

SEQ ID NO: 861 - RNA, 20 nt, Artificial Sequence
  Synthetic
cacuggggggaugaaggcug

SEQ ID NO: 862 - RNA, 20 nt, Artificial Sequence
  Synthetic
cagccuucauccccccagug

SEQ ID NO: 863 - RNA, 20 nt, Artificial Sequence
  Synthetic
caggucagccuucauccccc

SEQ ID NO: 864 - RNA, 20 nt, Artificial Sequence
  Synthetic
cagugcccaugaagaccuca

SEQ ID NO: 865 - RNA, 20 nt, Artificial Sequence
  Synthetic
cauccccccagugcccauga

SEQ ID NO: 866 - RNA, 20 nt, Artificial Sequence
  Synthetic
caugggcacuggggggauga

SEQ ID NO: 867 - RNA, 20 nt, Artificial Sequence
  Synthetic
ccagugcccaugaagaccuc

SEQ ID NO: 868 - RNA, 20 nt, Artificial Sequence
  Synthetic
cccagugcccaugaagaccu

SEQ ID NO: 869 - RNA, 20 nt, Artificial Sequence
  Synthetic
ccccagugcccaugaagacc

SEQ ID NO: 870 - RNA, 20 nt, Artificial Sequence
  Synthetic
cccccagugcccaugaagac

SEQ ID NO: 871 - RNA, 20 nt, Artificial Sequence
  Synthetic
ccccccagugcccaugaaga

SEQ ID NO: 872 - RNA, 20 nt, Artificial Sequence
  Synthetic
ccuucauccccccagugccc

SEQ ID NO: 873 - RNA, 20 nt, Artificial Sequence
  Synthetic
cuaugaggucuucaugggca

SEQ ID NO: 874 - RNA, 20 nt, Artificial Sequence
  Synthetic
cuucauccccccagugccca

SEQ ID NO: 875 - RNA, 20 nt, Artificial Sequence
  Synthetic
cuucaugggcacugggggga

SEQ ID NO: 876 - RNA, 20 nt, Artificial Sequence
  Synthetic
gaggucuucaugggcacugg

SEQ ID NO: 877 - RNA, 20 nt, Artificial Sequence
  Synthetic
gcacuggggggaugaaggcu

SEQ ID NO: 878 - RNA, 20 nt, Artificial Sequence
  Synthetic
gccuucauccccccagugcc

SEQ ID NO: 879 - RNA, 20 nt, Artificial Sequence
  Synthetic
ggcacuggggggaugaaggc

SEQ ID NO: 880 - RNA, 20 nt, Artificial Sequence
  Synthetic
gggcacuggggggaugaagg

SEQ ID NO: 881 - RNA, 20 nt, Artificial Sequence
  Synthetic
ggucagccuucaucccccca

SEQ ID NO: 882 - RNA, 20 nt, Artificial Sequence
  Synthetic
ggucuucaugggcacugggg

SEQ ID NO: 883 - RNA, 20 nt, Artificial Sequence
  Synthetic
gucagccuucauccccccag

SEQ ID NO: 884 - RNA, 20 nt, Artificial Sequence
  Synthetic
gucuucaugggcacuggggg

SEQ ID NO: 885 - RNA, 20 nt, Artificial Sequence
  Synthetic
uaugaggucuucaugggcac

SEQ ID NO: 886 - RNA, 20 nt, Artificial Sequence
  Synthetic
ucagccuucauccccccagu

SEQ ID NO: 887 - RNA, 20 nt, Artificial Sequence
  Synthetic
ucaggucagccuucaucccc

SEQ ID NO: 888 - RNA, 20 nt, Artificial Sequence
  Synthetic
ucauccccccagugcccaug

SEQ ID NO: 889 - RNA, 20 nt, Artificial Sequence
  Synthetic
ucaugggcacuggggggaug

SEQ ID NO: 890 - RNA, 20 nt, Artificial Sequence
  Synthetic
uccccccagugcccaugaag

SEQ ID NO: 891 - RNA, 20 nt, Artificial Sequence
  Synthetic
ucuaugaggucuucaugggc

SEQ ID NO: 892 - RNA, 20 nt, Artificial Sequence
  Synthetic
ucuucaugggcacugggggg

SEQ ID NO: 893 - RNA, 20 nt, Artificial Sequence
  Synthetic
ugaggucuucaugggcacug

SEQ ID NO: 894 - RNA, 20 nt, Artificial Sequence
  Synthetic
ugggcacuggggggaugaag

SEQ ID NO: 895 - RNA, 20 nt, Artificial Sequence
  Synthetic
uucauccccccagugcccau

SEQ ID NO: 896 - RNA, 20 nt, Artificial Sequence
  Synthetic
uucaugggcacuggggggau

SEQ ID NO: 897 - RNA, 20 nt, Artificial Sequence
  Synthetic
uucuaugaggucuucauggg

SEQ ID NO: 898 - RNA, 20 nt, Artificial Sequence
  Synthetic
uuucuaugaggucuucaugg

SEQ ID NO: 899 - RNA, 21 nt, Artificial Sequence
  Synthetic
acuggggggaugaaggcugac

SEQ ID NO: 900 - RNA, 21 nt, Artificial Sequence
  Synthetic
agccuucauccccccagugcc

SEQ ID NO: 901 - RNA, 21 nt, Artificial Sequence
  Synthetic
aggucagccuucaucccccca

SEQ ID NO: 902 - RNA, 21 nt, Artificial Sequence
  Synthetic
aggucuucaugggcacugggg

SEQ ID NO: 903 - RNA, 21 nt, Artificial Sequence
  Synthetic
agugcccaugaagaccucaua

SEQ ID NO: 904 - RNA, 21 nt, Artificial Sequence
  Synthetic
auccccccagugcccaugaag

SEQ ID NO: 905 - RNA, 21 nt, Artificial Sequence
  Synthetic
augaggucuucaugggcacug

SEQ ID NO: 906 - RNA, 21 nt, Artificial Sequence
  Synthetic
augggcacuggggggaugaag

SEQ ID NO: 907 - RNA, 21 nt, Artificial Sequence
  Synthetic
auuucuaugaggucuucaugg

SEQ ID NO: 908 - RNA, 21 nt, Artificial Sequence
  Synthetic
cacuggggggaugaaggcuga

SEQ ID NO: 909 - RNA, 21 nt, Artificial Sequence
  Synthetic
cagccuucauccccccagugc

SEQ ID NO: 910 - RNA, 21 nt, Artificial Sequence
  Synthetic
caggucagccuucaucccccc

SEQ ID NO: 911 - RNA, 21 nt, Artificial Sequence
  Synthetic
cagugcccaugaagaccucau

SEQ ID NO: 912 - RNA, 21 nt, Artificial Sequence
  Synthetic
cauccccccagugcccaugaa

SEQ ID NO: 913 - RNA, 21 nt, Artificial Sequence
  Synthetic
caugggcacuggggggaugaa

SEQ ID NO: 914 - RNA, 21 nt, Artificial Sequence
  Synthetic
ccagugcccaugaagaccuca

SEQ ID NO: 915 - RNA, 21 nt, Artificial Sequence
  Synthetic
cccagugcccaugaagaccuc

SEQ ID NO: 916 - RNA, 21 nt, Artificial Sequence
  Synthetic
ccccagugcccaugaagaccu

SEQ ID NO: 917 - RNA, 21 nt, Artificial Sequence
  Synthetic
cccccagugcccaugaagacc

SEQ ID NO: 918 - RNA, 21 nt, Artificial Sequence
  Synthetic
ccccccagugcccaugaagac

SEQ ID NO: 919 - RNA, 21 nt, Artificial Sequence
  Synthetic
ccuucauccccccagugccca

SEQ ID NO: 920 - RNA, 21 nt, Artificial Sequence
  Synthetic
cuaugaggucuucaugggcac

SEQ ID NO: 921 - RNA, 21 nt, Artificial Sequence
  Synthetic
cucaggucagccuucaucccc

SEQ ID NO: 922 - RNA, 21 nt, Artificial Sequence
  Synthetic
cuucauccccccagugcccau

SEQ ID NO: 923 - RNA, 21 nt, Artificial Sequence
  Synthetic
cuucaugggcacuggggggau

SEQ ID NO: 924 - RNA, 21 nt, Artificial Sequence
  Synthetic
gaggucuucaugggcacuggg

SEQ ID NO: 925 - RNA, 21 nt, Artificial Sequence
  Synthetic
gcacuggggggaugaaggcug

SEQ ID NO: 926 - RNA, 21 nt, Artificial Sequence
  Synthetic
gccuucauccccccagugccc

SEQ ID NO: 927 - RNA, 21 nt, Artificial Sequence
  Synthetic
ggcacuggggggaugaaggcu

SEQ ID NO: 928 - RNA, 21 nt, Artificial Sequence
  Synthetic
gggcacuggggggaugaaggc

SEQ ID NO: 929 - RNA, 21 nt, Artificial Sequence
  Synthetic
ggucagccuucauccccccag

SEQ ID NO: 930 - RNA, 21 nt, Artificial Sequence
  Synthetic
ggucuucaugggcacuggggg

SEQ ID NO: 931 - RNA, 21 nt, Artificial Sequence
  Synthetic
gucagccuucauccccccagu

SEQ ID NO: 932 - RNA, 21 nt, Artificial Sequence
  Synthetic
gucuucaugggcacugggggg

SEQ ID NO: 933 - RNA, 21 nt, Artificial Sequence
  Synthetic
uaugaggucuucaugggcacu

SEQ ID NO: 934 - RNA, 21 nt, Artificial Sequence
  Synthetic
ucagccuucauccccccagug

SEQ ID NO: 935 - RNA, 21 nt, Artificial Sequence
  Synthetic
ucaggucagccuucauccccc

SEQ ID NO: 936 - RNA, 21 nt, Artificial Sequence
  Synthetic
ucauccccccagugcccauga

SEQ ID NO: 937 - RNA, 21 nt, Artificial Sequence
  Synthetic
ucaugggcacuggggggauga

SEQ ID NO: 938 - RNA, 21 nt, Artificial Sequence
  Synthetic
uccccccagugcccaugaaga

SEQ ID NO: 939 - RNA, 21 nt, Artificial Sequence
  Synthetic
ucuaugaggucuucaugggca

SEQ ID NO: 940 - RNA, 21 nt, Artificial Sequence
  Synthetic
ucuucaugggcacugggggga

SEQ ID NO: 941 - RNA, 21 nt, Artificial Sequence
  Synthetic
ugaggucuucaugggcacugg

SEQ ID NO: 942 - RNA, 21 nt, Artificial Sequence
  Synthetic
ugggcacuggggggaugaagg

SEQ ID NO: 943 - RNA, 21 nt, Artificial Sequence
  Synthetic
uucauccccccagugcccaug

SEQ ID NO: 944 - RNA, 21 nt, Artificial Sequence
  Synthetic
uucaugggcacuggggggaug

SEQ ID NO: 945 - RNA, 21 nt, Artificial Sequence
  Synthetic
uucuaugaggucuucaugggc

SEQ ID NO: 946 - RNA, 21 nt, Artificial Sequence
  Synthetic
uuucuaugaggucuucauggg

SEQ ID NO: 947 - RNA, 22 nt, Artificial Sequence
  Synthetic
acuggggggaugaaggcugacc

SEQ ID NO: 948 - RNA, 22 nt, Artificial Sequence
  Synthetic
agccuucauccccccagugccc

SEQ ID NO: 949 - RNA, 22 nt, Artificial Sequence
  Synthetic
aggucagccuucauccccccag

SEQ ID NO: 950 - RNA, 22 nt, Artificial Sequence
  Synthetic
aggucuucaugggcacuggggg

SEQ ID NO: 951 - RNA, 22 nt, Artificial Sequence
  Synthetic
agugcccaugaagaccucauag

SEQ ID NO: 952 - RNA, 22 nt, Artificial Sequence
  Synthetic
auccccccagugcccaugaaga

SEQ ID NO: 953 - RNA, 22 nt, Artificial Sequence
  Synthetic
augaggucuucaugggcacugg

SEQ ID NO: 954 - RNA, 22 nt, Artificial Sequence
  Synthetic
augggcacuggggggaugaagg

SEQ ID NO: 955 - RNA, 22 nt, Artificial Sequence
  Synthetic
auuucuaugaggucuucauggg

SEQ ID NO: 956 - RNA, 22 nt, Artificial Sequence
  Synthetic
cacuggggggaugaaggcugac

SEQ ID NO: 957 - RNA, 22 nt, Artificial Sequence
  Synthetic
cagccuucauccccccagugcc

SEQ ID NO: 958 - RNA, 22 nt, Artificial Sequence
  Synthetic
caggucagccuucaucccccca

SEQ ID NO: 959 - RNA, 22 nt, Artificial Sequence
  Synthetic
cagugcccaugaagaccucaua

SEQ ID NO: 960 - RNA, 22 nt, Artificial Sequence
  Synthetic
cauccccccagugcccaugaag

SEQ ID NO: 961 - RNA, 22 nt, Artificial Sequence
  Synthetic
caugggcacuggggggaugaag

SEQ ID NO: 962 - RNA, 22 nt, Artificial Sequence
  Synthetic
ccagugcccaugaagaccucau

SEQ ID NO: 963 - RNA, 22 nt, Artificial Sequence
  Synthetic
cccagugcccaugaagaccuca

SEQ ID NO: 964 - RNA, 22 nt, Artificial Sequence
  Synthetic
ccccagugcccaugaagaccuc

SEQ ID NO: 965 - RNA, 22 nt, Artificial Sequence
  Synthetic
cccccagugcccaugaagaccu

SEQ ID NO: 966 - RNA, 22 nt, Artificial Sequence
  Synthetic
ccccccagugcccaugaagacc

SEQ ID NO: 967 - RNA, 22 nt, Artificial Sequence
  Synthetic
ccucaggucagccuucaucccc

SEQ ID NO: 968 - RNA, 22 nt, Artificial Sequence
  Synthetic
ccuucauccccccagugcccau

SEQ ID NO: 969 - RNA, 22 nt, Artificial Sequence
  Synthetic
cuaugaggucuucaugggcacu

SEQ ID NO: 970 - RNA, 22 nt, Artificial Sequence
  Synthetic
cucaggucagccuucauccccc

SEQ ID NO: 971 - RNA, 22 nt, Artificial Sequence
  Synthetic
cuucauccccccagugcccaug

SEQ ID NO: 972 - RNA, 22 nt, Artificial Sequence
  Synthetic
cuucaugggcacuggggggaug

SEQ ID NO: 973 - RNA, 22 nt, Artificial Sequence
  Synthetic
gaggucuucaugggcacugggg

SEQ ID NO: 974 - RNA, 22 nt, Artificial Sequence
  Synthetic
gauuucuaugaggucuucaugg

SEQ ID NO: 975 - RNA, 22 nt, Artificial Sequence
  Synthetic
gcacuggggggaugaaggcuga

SEQ ID NO: 976 - RNA, 22 nt, Artificial Sequence
  Synthetic
gccuucauccccccagugccca

SEQ ID NO: 977 - RNA, 22 nt, Artificial Sequence
  Synthetic
ggcacuggggggaugaaggcug

SEQ ID NO: 978 - RNA, 22 nt, Artificial Sequence
  Synthetic
gggcacuggggggaugaaggcu

SEQ ID NO: 979 - RNA, 22 nt, Artificial Sequence
  Synthetic
ggucagccuucauccccccagu

SEQ ID NO: 980 - RNA, 22 nt, Artificial Sequence
  Synthetic
ggucuucaugggcacugggggg

SEQ ID NO: 981 - RNA, 22 nt, Artificial Sequence
  Synthetic
gucagccuucauccccccagug

SEQ ID NO: 982 - RNA, 22 nt, Artificial Sequence
  Synthetic
gucuucaugggcacugggggga

SEQ ID NO: 983 - RNA, 22 nt, Artificial Sequence
  Synthetic
uaugaggucuucaugggcacug

SEQ ID NO: 984 - RNA, 22 nt, Artificial Sequence
  Synthetic
ucagccuucauccccccagugc

SEQ ID NO: 985 - RNA, 22 nt, Artificial Sequence
  Synthetic
ucaggucagccuucaucccccc

SEQ ID NO: 986 - RNA, 22 nt, Artificial Sequence
  Synthetic
ucauccccccagugcccaugaa

SEQ ID NO: 987 - RNA, 22 nt, Artificial Sequence
  Synthetic
ucaugggcacuggggggaugaa

SEQ ID NO: 988 - RNA, 22 nt, Artificial Sequence
  Synthetic
uccccccagugcccaugaagac

SEQ ID NO: 989 - RNA, 22 nt, Artificial Sequence
  Synthetic
ucuaugaggucuucaugggcac

SEQ ID NO: 990 - RNA, 22 nt, Artificial Sequence
  Synthetic
ucuucaugggcacuggggggau

SEQ ID NO: 991 - RNA, 22 nt, Artificial Sequence
  Synthetic
ugaggucuucaugggcacuggg

SEQ ID NO: 992 - RNA, 22 nt, Artificial Sequence
  Synthetic
ugggcacuggggggaugaaggc

SEQ ID NO: 993 - RNA, 22 nt, Artificial Sequence
  Synthetic
uucauccccccagugcccauga

SEQ ID NO: 994 - RNA, 22 nt, Artificial Sequence
  Synthetic
uucaugggcacuggggggauga

SEQ ID NO: 995 - RNA, 22 nt, Artificial Sequence
  Synthetic
uucuaugaggucuucaugggca

SEQ ID NO: 996 - RNA, 22 nt, Artificial Sequence
  Synthetic
uuucuaugaggucuucaugggc

SEQ ID NO: 997 - RNA, 20 nt, Artificial Sequence
  Synthetic
aaguccucauagaaaucaua

SEQ ID NO: 998 - RNA, 20 nt, Artificial Sequence
  Synthetic
aaugcccaugaaguccucau

SEQ ID NO: 999 - RNA, 20 nt, Artificial Sequence
  Synthetic
aggacuucaugggcauuggg

SEQ ID NO: 1000 - RNA, 20 nt, Artificial Sequence
  Synthetic
aguccucauagaaaucauag

SEQ ID NO: 1001 - RNA, 20 nt, Artificial Sequence
  Synthetic
auccccccaaugcccaugaa

SEQ ID NO: 1002 - RNA, 20 nt, Artificial Sequence
  Synthetic
augaaguccucauagaaauc

SEQ ID NO: 1003 - RNA, 20 nt, Artificial Sequence
  Synthetic
augaggacuucaugggcauu

SEQ ID NO: 1004 - RNA, 20 nt, Artificial Sequence
  Synthetic
augauuucuaugaggacuuc

SEQ ID NO: 1005 - RNA, 20 nt, Artificial Sequence
  Synthetic
augcccaugaaguccucaua

SEQ ID NO: 1006 - RNA, 20 nt, Artificial Sequence
  Synthetic
auuucuaugaggacuucaug

SEQ ID NO: 1007 - RNA, 20 nt, Artificial Sequence
  Synthetic
caaugcccaugaaguccuca

SEQ ID NO: 1008 - RNA, 20 nt, Artificial Sequence
  Synthetic
cauccccccaaugcccauga

SEQ ID NO: 1009 - RNA, 20 nt, Artificial Sequence
  Synthetic
caugaaguccucauagaaau

SEQ ID NO: 1010 - RNA, 20 nt, Artificial Sequence
  Synthetic
ccaaugcccaugaaguccuc

SEQ ID NO: 1011 - RNA, 20 nt, Artificial Sequence
  Synthetic
ccaugaaguccucauagaaa

SEQ ID NO: 1012 - RNA, 20 nt, Artificial Sequence
  Synthetic
cccaaugcccaugaaguccu

SEQ ID NO: 1013 - RNA, 20 nt, Artificial Sequence
  Synthetic
cccaugaaguccucauagaa

SEQ ID NO: 1014 - RNA, 20 nt, Artificial Sequence
  Synthetic
ccccaaugcccaugaagucc

SEQ ID NO: 1015 - RNA, 20 nt, Artificial Sequence
  Synthetic
cccccaaugcccaugaaguc

SEQ ID NO: 1016 - RNA, 20 nt, Artificial Sequence
  Synthetic
ccccccaaugcccaugaagu

SEQ ID NO: 1017 - RNA, 20 nt, Artificial Sequence
  Synthetic
ccuaugauuucuaugaggac

SEQ ID NO: 1018 - RNA, 20 nt, Artificial Sequence
  Synthetic
cuaugaggacuucaugggca

SEQ ID NO: 1019 - RNA, 20 nt, Artificial Sequence
  Synthetic
cuaugauuucuaugaggacu

SEQ ID NO: 1020 - RNA, 20 nt, Artificial Sequence
  Synthetic
cuuguccuaugauuucuaug

SEQ ID NO: 1021 - RNA, 20 nt, Artificial Sequence
  Synthetic
gaaguccucauagaaaucau

SEQ ID NO: 1022 - RNA, 20 nt, Artificial Sequence
  Synthetic
gacuucaugggcauuggggg

SEQ ID NO: 1023 - RNA, 20 nt, Artificial Sequence
  Synthetic
gaggacuucaugggcauugg

SEQ ID NO: 1024 - RNA, 20 nt, Artificial Sequence
  Synthetic
gauuucuaugaggacuucau

SEQ ID NO: 1025 - RNA, 20 nt, Artificial Sequence
  Synthetic
gcccaugaaguccucauaga

SEQ ID NO: 1026 - RNA, 20 nt, Artificial Sequence
  Synthetic
ggacuucaugggcauugggg

SEQ ID NO: 1027 - RNA, 20 nt, Artificial Sequence
  Synthetic
guccuaugauuucuaugagg

SEQ ID NO: 1028 - RNA, 20 nt, Artificial Sequence
  Synthetic
guccucauagaaaucauagg

SEQ ID NO: 1029 - RNA, 20 nt, Artificial Sequence
  Synthetic
uaugaggacuucaugggcau

SEQ ID NO: 1030 - RNA, 20 nt, Artificial Sequence
  Synthetic
uaugauuucuaugaggacuu

SEQ ID NO: 1031 - RNA, 20 nt, Artificial Sequence
  Synthetic
ucauccccccaaugcccaug

SEQ ID NO: 1032 - RNA, 20 nt, Artificial Sequence
  Synthetic
uccccccaaugcccaugaag

SEQ ID NO: 1033 - RNA, 20 nt, Artificial Sequence
  Synthetic
uccuaugauuucuaugagga

SEQ ID NO: 1034 - RNA, 20 nt, Artificial Sequence
  Synthetic
ucuaugaggacuucaugggc

SEQ ID NO: 1035 - RNA, 20 nt, Artificial Sequence
  Synthetic
ugaaguccucauagaaauca

SEQ ID NO: 1036 - RNA, 20 nt, Artificial Sequence
  Synthetic
ugaggacuucaugggcauug

SEQ ID NO: 1037 - RNA, 20 nt, Artificial Sequence
  Synthetic
ugauuucuaugaggacuuca

SEQ ID NO: 1038 - RNA, 20 nt, Artificial Sequence
  Synthetic
ugcccaugaaguccucauag

SEQ ID NO: 1039 - RNA, 20 nt, Artificial Sequence
  Synthetic
uguccuaugauuucuaugag

SEQ ID NO: 1040 - RNA, 20 nt, Artificial Sequence
  Synthetic
uucuaugaggacuucauggg

SEQ ID NO: 1041 - RNA, 20 nt, Artificial Sequence
  Synthetic
uuguccuaugauuucuauga

SEQ ID NO: 1042 - RNA, 20 nt, Artificial Sequence
  Synthetic
uuucuaugaggacuucaugg

SEQ ID NO: 1043 - RNA, 21 nt, Artificial Sequence
  Synthetic
aaguccucauagaaaucauag

SEQ ID NO: 1044 - RNA, 21 nt, Artificial Sequence
  Synthetic
aaugcccaugaaguccucaua

SEQ ID NO: 1045 - RNA, 21 nt, Artificial Sequence
  Synthetic
aggacuucaugggcauugggg

SEQ ID NO: 1046 - RNA, 21 nt, Artificial Sequence
  Synthetic
aguccucauagaaaucauagg

SEQ ID NO: 1047 - RNA, 21 nt, Artificial Sequence
  Synthetic
auccccccaaugcccaugaag

SEQ ID NO: 1048 - RNA, 21 nt, Artificial Sequence
  Synthetic
augaaguccucauagaaauca

SEQ ID NO: 1049 - RNA, 21 nt, Artificial Sequence
  Synthetic
augaggacuucaugggcauug

SEQ ID NO: 1050 - RNA, 21 nt, Artificial Sequence
  Synthetic
augauuucuaugaggacuuca

SEQ ID NO: 1051 - RNA, 21 nt, Artificial Sequence
  Synthetic
augcccaugaaguccucauag

SEQ ID NO: 1052 - RNA, 21 nt, Artificial Sequence
  Synthetic
auuucuaugaggacuucaugg

SEQ ID NO: 1053 - RNA, 21 nt, Artificial Sequence
  Synthetic
caaugcccaugaaguccucau

SEQ ID NO: 1054 - RNA, 21 nt, Artificial Sequence
  Synthetic
cauccccccaaugcccaugaa

SEQ ID NO: 1055 - RNA, 21 nt, Artificial Sequence
  Synthetic
caugaaguccucauagaaauc

SEQ ID NO: 1056 - RNA, 21 nt, Artificial Sequence
  Synthetic
ccaaugcccaugaaguccuca

SEQ ID NO: 1057 - RNA, 21 nt, Artificial Sequence
  Synthetic
ccaugaaguccucauagaaau

SEQ ID NO: 1058 - RNA, 21 nt, Artificial Sequence
  Synthetic
cccaaugcccaugaaguccuc

SEQ ID NO: 1059 - RNA, 21 nt, Artificial Sequence
  Synthetic
cccaugaaguccucauagaaa

SEQ ID NO: 1060 - RNA, 21 nt, Artificial Sequence
  Synthetic
ccccaaugcccaugaaguccu

SEQ ID NO: 1061 - RNA, 21 nt, Artificial Sequence
  Synthetic
cccccaaugcccaugaagucc

SEQ ID NO: 1062 - RNA, 21 nt, Artificial Sequence
  Synthetic
ccccccaaugcccaugaaguc

SEQ ID NO: 1063 - RNA, 21 nt, Artificial Sequence
  Synthetic
ccuaugauuucuaugaggacu

SEQ ID NO: 1064 - RNA, 21 nt, Artificial Sequence
  Synthetic
cuaugaggacuucaugggcau

SEQ ID NO: 1065 - RNA, 21 nt, Artificial Sequence
  Synthetic
cuaugauuucuaugaggacuu

SEQ ID NO: 1066 - RNA, 21 nt, Artificial Sequence
  Synthetic
cuuguccuaugauuucuauga

SEQ ID NO: 1067 - RNA, 21 nt, Artificial Sequence
  Synthetic
gaaguccucauagaaaucaua

SEQ ID NO: 1068 - RNA, 21 nt, Artificial Sequence
  Synthetic
gacuucaugggcauugggggg

SEQ ID NO: 1069 - RNA, 21 nt, Artificial Sequence
  Synthetic
gaggacuucaugggcauuggg

SEQ ID NO: 1070 - RNA, 21 nt, Artificial Sequence
  Synthetic
gauuucuaugaggacuucaug

SEQ ID NO: 1071 - RNA, 21 nt, Artificial Sequence
  Synthetic
gcccaugaaguccucauagaa

SEQ ID NO: 1072 - RNA, 21 nt, Artificial Sequence
  Synthetic
gcuuguccuaugauuucuaug

SEQ ID NO: 1073 - RNA, 21 nt, Artificial Sequence
  Synthetic
ggacuucaugggcauuggggg

SEQ ID NO: 1074 - RNA, 21 nt, Artificial Sequence
  Synthetic
guccuaugauuucuaugagga

SEQ ID NO: 1075 - RNA, 21 nt, Artificial Sequence
  Synthetic
guccucauagaaaucauagga

SEQ ID NO: 1076 - RNA, 21 nt, Artificial Sequence
  Synthetic
uaugaggacuucaugggcauu

SEQ ID NO: 1077 - RNA, 21 nt, Artificial Sequence
  Synthetic
uaugauuucuaugaggacuuc

SEQ ID NO: 1078 - RNA, 21 nt, Artificial Sequence
  Synthetic
ucauccccccaaugcccauga

SEQ ID NO: 1079 - RNA, 21 nt, Artificial Sequence
  Synthetic
uccccccaaugcccaugaagu

SEQ ID NO: 1080 - RNA, 21 nt, Artificial Sequence
  Synthetic
uccuaugauuucuaugaggac

SEQ ID NO: 1081 - RNA, 21 nt, Artificial Sequence
  Synthetic
ucuaugaggacuucaugggca

SEQ ID NO: 1082 - RNA, 21 nt, Artificial Sequence
  Synthetic
ugaaguccucauagaaaucau

SEQ ID NO: 1083 - RNA, 21 nt, Artificial Sequence
  Synthetic
ugaggacuucaugggcauugg

SEQ ID NO: 1084 - RNA, 21 nt, Artificial Sequence
  Synthetic
ugauuucuaugaggacuucau

SEQ ID NO: 1085 - RNA, 21 nt, Artificial Sequence
  Synthetic
ugcccaugaaguccucauaga

SEQ ID NO: 1086 - RNA, 21 nt, Artificial Sequence
  Synthetic
uguccuaugauuucuaugagg

SEQ ID NO: 1087 - RNA, 21 nt, Artificial Sequence
  Synthetic
uucauccccccaaugcccaug

SEQ ID NO: 1088 - RNA, 21 nt, Artificial Sequence
  Synthetic
uucuaugaggacuucaugggc

SEQ ID NO: 1089 - RNA, 21 nt, Artificial Sequence
  Synthetic
uuguccuaugauuucuaugag

SEQ ID NO: 1090 - RNA, 21 nt, Artificial Sequence
  Synthetic
uuucuaugaggacuucauggg

SEQ ID NO: 1091 - RNA, 22 nt, Artificial Sequence
  Synthetic
aaguccucauagaaaucauagg

SEQ ID NO: 1092 - RNA, 22 nt, Artificial Sequence
  Synthetic
aaugcccaugaaguccucauag

SEQ ID NO: 1093 - RNA, 22 nt, Artificial Sequence
  Synthetic
aggacuucaugggcauuggggg

SEQ ID NO: 1094 - RNA, 22 nt, Artificial Sequence
  Synthetic
aguccucauagaaaucauagga

SEQ ID NO: 1095 - RNA, 22 nt, Artificial Sequence
  Synthetic
auccccccaaugcccaugaagu

SEQ ID NO: 1096 - RNA, 22 nt, Artificial Sequence
  Synthetic
augaaguccucauagaaaucau

SEQ ID NO: 1097 - RNA, 22 nt, Artificial Sequence
  Synthetic
augaggacuucaugggcauugg

SEQ ID NO: 1098 - RNA, 22 nt, Artificial Sequence
  Synthetic
augauuucuaugaggacuucau

SEQ ID NO: 1099 - RNA, 22 nt, Artificial Sequence
  Synthetic
augcccaugaaguccucauaga

SEQ ID NO: 1100 - RNA, 22 nt, Artificial Sequence
  Synthetic
auuucuaugaggacuucauggg

SEQ ID NO: 1101 - RNA, 22 nt, Artificial Sequence
  Synthetic
caaugcccaugaaguccucaua

SEQ ID NO: 1102 - RNA, 22 nt, Artificial Sequence
  Synthetic
cauccccccaaugcccaugaag

SEQ ID NO: 1103 - RNA, 22 nt, Artificial Sequence
  Synthetic
caugaaguccucauagaaauca

SEQ ID NO: 1104 - RNA, 22 nt, Artificial Sequence
  Synthetic
ccaaugcccaugaaguccucau

SEQ ID NO: 1105 - RNA, 22 nt, Artificial Sequence
  Synthetic
ccaugaaguccucauagaaauc

SEQ ID NO: 1106 - RNA, 22 nt, Artificial Sequence
  Synthetic
cccaaugcccaugaaguccuca

SEQ ID NO: 1107 - RNA, 22 nt, Artificial Sequence
  Synthetic
cccaugaaguccucauagaaau

SEQ ID NO: 1108 - RNA, 22 nt, Artificial Sequence
  Synthetic
ccccaaugcccaugaaguccuc

SEQ ID NO: 1109 - RNA, 22 nt, Artificial Sequence
  Synthetic
cccccaaugcccaugaaguccu

SEQ ID NO: 1110 - RNA, 22 nt, Artificial Sequence
  Synthetic
ccccccaaugcccaugaagucc

SEQ ID NO: 1111 - RNA, 22 nt, Artificial Sequence
  Synthetic
ccuaugauuucuaugaggacuu

SEQ ID NO: 1112 - RNA, 22 nt, Artificial Sequence
  Synthetic
cuaugaggacuucaugggcauu

SEQ ID NO: 1113 - RNA, 22 nt, Artificial Sequence
  Synthetic
cuaugauuucuaugaggacuuc

SEQ ID NO: 1114 - RNA, 22 nt, Artificial Sequence
  Synthetic
cuucauccccccaaugcccaug

SEQ ID NO: 1115 - RNA, 22 nt, Artificial Sequence
  Synthetic
cuuguccuaugauuucuaugag

SEQ ID NO: 1116 - RNA, 22 nt, Artificial Sequence
  Synthetic
gaaguccucauagaaaucauag

SEQ ID NO: 1117 - RNA, 22 nt, Artificial Sequence
  Synthetic
gacuucaugggcauugggggga

SEQ ID NO: 1118 - RNA, 22 nt, Artificial Sequence
  Synthetic
gaggacuucaugggcauugggg

SEQ ID NO: 1119 - RNA, 22 nt, Artificial Sequence
  Synthetic
gauuucuaugaggacuucaugg

SEQ ID NO: 1120 - RNA, 22 nt, Artificial Sequence
  Synthetic
gcccaugaaguccucauagaaa

SEQ ID NO: 1121 - RNA, 22 nt, Artificial Sequence
  Synthetic
gcuuguccuaugauuucuauga

SEQ ID NO: 1122 - RNA, 22 nt, Artificial Sequence
  Synthetic
ggacuucaugggcauugggggg

SEQ ID NO: 1123 - RNA, 22 nt, Artificial Sequence
  Synthetic
ggcuuguccuaugauuucuaug

SEQ ID NO: 1124 - RNA, 22 nt, Artificial Sequence
  Synthetic
guccuaugauuucuaugaggac

SEQ ID NO: 1125 - RNA, 22 nt, Artificial Sequence
  Synthetic
guccucauagaaaucauaggac

SEQ ID NO: 1126 - RNA, 22 nt, Artificial Sequence
  Synthetic
uaugaggacuucaugggcauug

SEQ ID NO: 1127 - RNA, 22 nt, Artificial Sequence
  Synthetic
uaugauuucuaugaggacuuca

SEQ ID NO: 1128 - RNA, 22 nt, Artificial Sequence
  Synthetic
ucauccccccaaugcccaugaa

SEQ ID NO: 1129 - RNA, 22 nt, Artificial Sequence
  Synthetic
uccccccaaugcccaugaaguc

SEQ ID NO: 1130 - RNA, 22 nt, Artificial Sequence
  Synthetic
uccuaugauuucuaugaggacu

SEQ ID NO: 1131 - RNA, 22 nt, Artificial Sequence
  Synthetic
ucuaugaggacuucaugggcau

SEQ ID NO: 1132 - RNA, 22 nt, Artificial Sequence
  Synthetic
ugaaguccucauagaaaucaua

SEQ ID NO: 1133 - RNA, 22 nt, Artificial Sequence
  Synthetic
ugaggacuucaugggcauuggg

SEQ ID NO: 1134 - RNA, 22 nt, Artificial Sequence
  Synthetic
ugauuucuaugaggacuucaug

SEQ ID NO: 1135 - RNA, 22 nt, Artificial Sequence
  Synthetic
ugcccaugaaguccucauagaa

SEQ ID NO: 1136 - RNA, 22 nt, Artificial Sequence
  Synthetic
uguccuaugauuucuaugagga

SEQ ID NO: 1137 - RNA, 22 nt, Artificial Sequence
  Synthetic
uucauccccccaaugcccauga

SEQ ID NO: 1138 - RNA, 22 nt, Artificial Sequence
  Synthetic
uucuaugaggacuucaugggca

SEQ ID NO: 1139 - RNA, 22 nt, Artificial Sequence
  Synthetic
uuguccuaugauuucuaugagg

SEQ ID NO: 1140 - RNA, 22 nt, Artificial Sequence
  Synthetic
uuucuaugaggacuucaugggc

SEQ ID NO: 1141 - RNA, 20 nt, Artificial Sequence
  Synthetic
aaaggcuuguccugugauuu

SEQ ID NO: 1142 - RNA, 20 nt, Artificial Sequence
  Synthetic
aaaucacaggacaagccuuu

SEQ ID NO: 1143 - RNA, 20 nt, Artificial Sequence
  Synthetic
aagaccucauagaaaucaca

SEQ ID NO: 1144 - RNA, 20 nt, Artificial Sequence
  Synthetic
aaggcuuguccugugauuuc

SEQ ID NO: 1145 - RNA, 20 nt, Artificial Sequence
  Synthetic
aaucacaggacaagccuuug

SEQ ID NO: 1146 - RNA, 20 nt, Artificial Sequence
  Synthetic
acaggacaagccuuuggcac

SEQ ID NO: 1147 - RNA, 20 nt, Artificial Sequence
  Synthetic
accucauagaaaucacagga

SEQ ID NO: 1148 - RNA, 20 nt, Artificial Sequence
  Synthetic
agaaaucacaggacaagccu

SEQ ID NO: 1149 - RNA, 20 nt, Artificial Sequence
  Synthetic
agaccucauagaaaucacag

SEQ ID NO: 1150 - RNA, 20 nt, Artificial Sequence
  Synthetic
aggcuuguccugugauuucu

SEQ ID NO: 1151 - RNA, 20 nt, Artificial Sequence
  Synthetic
auagaaaucacaggacaagc

SEQ ID NO: 1152 - RNA, 20 nt, Artificial Sequence
  Synthetic
aucacaggacaagccuuugg

SEQ ID NO: 1153 - RNA, 20 nt, Artificial Sequence
  Synthetic
augaagaccucauagaaauc

SEQ ID NO: 1154 - RNA, 20 nt, Artificial Sequence
  Synthetic
caaaggcuuguccugugauu

SEQ ID NO: 1155 - RNA, 20 nt, Artificial Sequence
  Synthetic
cacaggacaagccuuuggca

SEQ ID NO: 1156 - RNA, 20 nt, Artificial Sequence
  Synthetic
cauagaaaucacaggacaag

SEQ ID NO: 1157 - RNA, 20 nt, Artificial Sequence
  Synthetic
caugaagaccucauagaaau

SEQ ID NO: 1158 - RNA, 20 nt, Artificial Sequence
  Synthetic
ccaaaggcuuguccugugau

SEQ ID NO: 1159 - RNA, 20 nt, Artificial Sequence
  Synthetic
ccaugaagaccucauagaaa

SEQ ID NO: 1160 - RNA, 20 nt, Artificial Sequence
  Synthetic
ccucauagaaaucacaggac

SEQ ID NO: 1161 - RNA, 20 nt, Artificial Sequence
  Synthetic
ccugugauuucuaugagguc

SEQ ID NO: 1162 - RNA, 20 nt, Artificial Sequence
  Synthetic
cucauagaaaucacaggaca

SEQ ID NO: 1163 - RNA, 20 nt, Artificial Sequence
  Synthetic
cugugauuucuaugaggucu

SEQ ID NO: 1164 - RNA, 20 nt, Artificial Sequence
  Synthetic
cuuguccugugauuucuaug

SEQ ID NO: 1165 - RNA, 20 nt, Artificial Sequence
  Synthetic
gaaaucacaggacaagccuu

SEQ ID NO: 1166 - RNA, 20 nt, Artificial Sequence
  Synthetic
gaagaccucauagaaaucac

SEQ ID NO: 1167 - RNA, 20 nt, Artificial Sequence
  Synthetic
gaccucauagaaaucacagg

SEQ ID NO: 1168 - RNA, 20 nt, Artificial Sequence
  Synthetic
gccaaaggcuuguccuguga

SEQ ID NO: 1169 - RNA, 20 nt, Artificial Sequence
  Synthetic
gcuuguccugugauuucuau

SEQ ID NO: 1170 - RNA, 20 nt, Artificial Sequence
  Synthetic
ggcuuguccugugauuucua

SEQ ID NO: 1171 - RNA, 20 nt, Artificial Sequence
  Synthetic
ggugccaaaggcuuguccug

SEQ ID NO: 1172 - RNA, 20 nt, Artificial Sequence
  Synthetic
guccugugauuucuaugagg

SEQ ID NO: 1173 - RNA, 20 nt, Artificial Sequence
  Synthetic
gugccaaaggcuuguccugu

SEQ ID NO: 1174 - RNA, 20 nt, Artificial Sequence
  Synthetic
guuuggugccaaaggcuugu

SEQ ID NO: 1175 - RNA, 20 nt, Artificial Sequence
  Synthetic
uagaaaucacaggacaagcc

SEQ ID NO: 1176 - RNA, 20 nt, Artificial Sequence
  Synthetic
ucacaggacaagccuuuggc

SEQ ID NO: 1177 - RNA, 20 nt, Artificial Sequence
  Synthetic
ucauagaaaucacaggacaa

SEQ ID NO: 1178 - RNA, 20 nt, Artificial Sequence
  Synthetic
uccugugauuucuaugaggu

SEQ ID NO: 1179 - RNA, 20 nt, Artificial Sequence
  Synthetic
ugaagaccucauagaaauca

SEQ ID NO: 1180 - RNA, 20 nt, Artificial Sequence
  Synthetic
ugccaaaggcuuguccugug

SEQ ID NO: 1181 - RNA, 20 nt, Artificial Sequence
  Synthetic
uggugccaaaggcuuguccu

SEQ ID NO: 1182 - RNA, 20 nt, Artificial Sequence
  Synthetic
uguccugugauuucuaugag

SEQ ID NO: 1183 - RNA, 20 nt, Artificial Sequence
  Synthetic
ugugauuucuaugaggucuu

SEQ ID NO: 1184 - RNA, 20 nt, Artificial Sequence
  Synthetic
uuggugccaaaggcuugucc

SEQ ID NO: 1185 - RNA, 20 nt, Artificial Sequence
  Synthetic
uuguccugugauuucuauga

SEQ ID NO: 1186 - RNA, 20 nt, Artificial Sequence
  Synthetic
uuuggugccaaaggcuuguc

SEQ ID NO: 1187 - RNA, 21 nt, Artificial Sequence
  Synthetic
aaaggcuuguccugugauuuc

SEQ ID NO: 1188 - RNA, 21 nt, Artificial Sequence
  Synthetic
aaaucacaggacaagccuuug

SEQ ID NO: 1189 - RNA, 21 nt, Artificial Sequence
  Synthetic
aagaccucauagaaaucacag

SEQ ID NO: 1190 - RNA, 21 nt, Artificial Sequence
  Synthetic
aaggcuuguccugugauuucu

SEQ ID NO: 1191 - RNA, 21 nt, Artificial Sequence
  Synthetic
aaucacaggacaagccuuugg

SEQ ID NO: 1192 - RNA, 21 nt, Artificial Sequence
  Synthetic
acaggacaagccuuuggcacc

SEQ ID NO: 1193 - RNA, 21 nt, Artificial Sequence
  Synthetic
accucauagaaaucacaggac

SEQ ID NO: 1194 - RNA, 21 nt, Artificial Sequence
  Synthetic
agaaaucacaggacaagccuu

SEQ ID NO: 1195 - RNA, 21 nt, Artificial Sequence
  Synthetic
agaccucauagaaaucacagg

SEQ ID NO: 1196 - RNA, 21 nt, Artificial Sequence
  Synthetic
aggcuuguccugugauuucua

SEQ ID NO: 1197 - RNA, 21 nt, Artificial Sequence
  Synthetic
auagaaaucacaggacaagcc

SEQ ID NO: 1198 - RNA, 21 nt, Artificial Sequence
  Synthetic
aucacaggacaagccuuuggc

SEQ ID NO: 1199 - RNA, 21 nt, Artificial Sequence
  Synthetic
augaagaccucauagaaauca

SEQ ID NO: 1200 - RNA, 21 nt, Artificial Sequence
  Synthetic
caaaggcuuguccugugauuu

SEQ ID NO: 1201 - RNA, 21 nt, Artificial Sequence
  Synthetic
cacaggacaagccuuuggcac

SEQ ID NO: 1202 - RNA, 21 nt, Artificial Sequence
  Synthetic
cauagaaaucacaggacaagc

SEQ ID NO: 1203 - RNA, 21 nt, Artificial Sequence
  Synthetic
caugaagaccucauagaaauc

SEQ ID NO: 1204 - RNA, 21 nt, Artificial Sequence
  Synthetic
ccaaaggcuuguccugugauu

SEQ ID NO: 1205 - RNA, 21 nt, Artificial Sequence
  Synthetic
ccaugaagaccucauagaaau

SEQ ID NO: 1206 - RNA, 21 nt, Artificial Sequence
  Synthetic
cccaugaagaccucauagaaa

SEQ ID NO: 1207 - RNA, 21 nt, Artificial Sequence
  Synthetic
ccucauagaaaucacaggaca

SEQ ID NO: 1208 - RNA, 21 nt, Artificial Sequence
  Synthetic
ccugugauuucuaugaggucu

SEQ ID NO: 1209 - RNA, 21 nt, Artificial Sequence
  Synthetic
cucauagaaaucacaggacaa

SEQ ID NO: 1210 - RNA, 21 nt, Artificial Sequence
  Synthetic
cugugauuucuaugaggucuu

SEQ ID NO: 1211 - RNA, 21 nt, Artificial Sequence
  Synthetic
cuuguccugugauuucuauga

SEQ ID NO: 1212 - RNA, 21 nt, Artificial Sequence
  Synthetic
gaaaucacaggacaagccuuu

SEQ ID NO: 1213 - RNA, 21 nt, Artificial Sequence
  Synthetic
gaagaccucauagaaaucaca

SEQ ID NO: 1214 - RNA, 21 nt, Artificial Sequence
  Synthetic
gaccucauagaaaucacagga

SEQ ID NO: 1215 - RNA, 21 nt, Artificial Sequence
  Synthetic
gccaaaggcuuguccugugau

SEQ ID NO: 1216 - RNA, 21 nt, Artificial Sequence
  Synthetic
gcuuguccugugauuucuaug

SEQ ID NO: 1217 - RNA, 21 nt, Artificial Sequence
  Synthetic
ggcuuguccugugauuucuau

SEQ ID NO: 1218 - RNA, 21 nt, Artificial Sequence
  Synthetic
ggugccaaaggcuuguccugu

SEQ ID NO: 1219 - RNA, 21 nt, Artificial Sequence
  Synthetic
guccugugauuucuaugaggu

SEQ ID NO: 1220 - RNA, 21 nt, Artificial Sequence
  Synthetic
gugccaaaggcuuguccugug

SEQ ID NO: 1221 - RNA, 21 nt, Artificial Sequence
  Synthetic
guuuggugccaaaggcuuguc

SEQ ID NO: 1222 - RNA, 21 nt, Artificial Sequence
  Synthetic
uagaaaucacaggacaagccu

SEQ ID NO: 1223 - RNA, 21 nt, Artificial Sequence
  Synthetic
ucacaggacaagccuuuggca

SEQ ID NO: 1224 - RNA, 21 nt, Artificial Sequence
  Synthetic
ucauagaaaucacaggacaag

SEQ ID NO: 1225 - RNA, 21 nt, Artificial Sequence
  Synthetic
uccugugauuucuaugagguc

SEQ ID NO: 1226 - RNA, 21 nt, Artificial Sequence
  Synthetic
ugaagaccucauagaaaucac

SEQ ID NO: 1227 - RNA, 21 nt, Artificial Sequence
  Synthetic
ugccaaaggcuuguccuguga

SEQ ID NO: 1228 - RNA, 21 nt, Artificial Sequence
  Synthetic
uggugccaaaggcuuguccug

SEQ ID NO: 1229 - RNA, 21 nt, Artificial Sequence
  Synthetic
uguccugugauuucuaugagg

SEQ ID NO: 1230 - RNA, 21 nt, Artificial Sequence
  Synthetic
ugugauuucuaugaggucuuc

SEQ ID NO: 1231 - RNA, 21 nt, Artificial Sequence
  Synthetic
uguuuggugccaaaggcuugu

SEQ ID NO: 1232 - RNA, 21 nt, Artificial Sequence
  Synthetic
uuggugccaaaggcuuguccu

SEQ ID NO: 1233 - RNA, 21 nt, Artificial Sequence
  Synthetic
uuguccugugauuucuaugag

SEQ ID NO: 1234 - RNA, 21 nt, Artificial Sequence
  Synthetic
uuuggugccaaaggcuugucc

SEQ ID NO: 1235 - RNA, 22 nt, Artificial Sequence
  Synthetic
aaaggcuuguccugugauuucu

SEQ ID NO: 1236 - RNA, 22 nt, Artificial Sequence
  Synthetic
aaaucacaggacaagccuuugg

SEQ ID NO: 1237 - RNA, 22 nt, Artificial Sequence
  Synthetic
aagaccucauagaaaucacagg

SEQ ID NO: 1238 - RNA, 22 nt, Artificial Sequence
  Synthetic
aaggcuuguccugugauuucua

SEQ ID NO: 1239 - RNA, 22 nt, Artificial Sequence
  Synthetic
aaucacaggacaagccuuuggc

SEQ ID NO: 1240 - RNA, 22 nt, Artificial Sequence
  Synthetic
acaggacaagccuuuggcacca

SEQ ID NO: 1241 - RNA, 22 nt, Artificial Sequence
  Synthetic
accucauagaaaucacaggaca

SEQ ID NO: 1242 - RNA, 22 nt, Artificial Sequence
  Synthetic
agaaaucacaggacaagccuuu

SEQ ID NO: 1243 - RNA, 22 nt, Artificial Sequence
  Synthetic
agaccucauagaaaucacagga

SEQ ID NO: 1244 - RNA, 22 nt, Artificial Sequence
  Synthetic
aggcuuguccugugauuucuau

SEQ ID NO: 1245 - RNA, 22 nt, Artificial Sequence
  Synthetic
auagaaaucacaggacaagccu

SEQ ID NO: 1246 - RNA, 22 nt, Artificial Sequence
  Synthetic
aucacaggacaagccuuuggca

SEQ ID NO: 1247 - RNA, 22 nt, Artificial Sequence
  Synthetic
augaagaccucauagaaaucac

SEQ ID NO: 1248 - RNA, 22 nt, Artificial Sequence
  Synthetic
auguuuggugccaaaggcuugu

SEQ ID NO: 1249 - RNA, 22 nt, Artificial Sequence
  Synthetic
caaaggcuuguccugugauuuc

SEQ ID NO: 1250 - RNA, 22 nt, Artificial Sequence
  Synthetic
cacaggacaagccuuuggcacc

SEQ ID NO: 1251 - RNA, 22 nt, Artificial Sequence
  Synthetic
cauagaaaucacaggacaagcc

SEQ ID NO: 1252 - RNA, 22 nt, Artificial Sequence
  Synthetic
caugaagaccucauagaaauca

SEQ ID NO: 1253 - RNA, 22 nt, Artificial Sequence
  Synthetic
ccaaaggcuuguccugugauuu

SEQ ID NO: 1254 - RNA, 22 nt, Artificial Sequence
  Synthetic
ccaugaagaccucauagaaauc

SEQ ID NO: 1255 - RNA, 22 nt, Artificial Sequence
  Synthetic
cccaugaagaccucauagaaau

SEQ ID NO: 1256 - RNA, 22 nt, Artificial Sequence
  Synthetic
ccucauagaaaucacaggacaa

SEQ ID NO: 1257 - RNA, 22 nt, Artificial Sequence
  Synthetic
ccugugauuucuaugaggucuu

SEQ ID NO: 1258 - RNA, 22 nt, Artificial Sequence
  Synthetic
cucauagaaaucacaggacaag

SEQ ID NO: 1259 - RNA, 22 nt, Artificial Sequence
  Synthetic
cugugauuucuaugaggucuuc

SEQ ID NO: 1260 - RNA, 22 nt, Artificial Sequence
  Synthetic
cuuguccugugauuucuaugag

SEQ ID NO: 1261 - RNA, 22 nt, Artificial Sequence
  Synthetic
gaaaucacaggacaagccuuug

SEQ ID NO: 1262 - RNA, 22 nt, Artificial Sequence
  Synthetic
gaagaccucauagaaaucacag

SEQ ID NO: 1263 - RNA, 22 nt, Artificial Sequence
  Synthetic
gaccucauagaaaucacaggac

SEQ ID NO: 1264 - RNA, 22 nt, Artificial Sequence
  Synthetic
gccaaaggcuuguccugugauu

SEQ ID NO: 1265 - RNA, 22 nt, Artificial Sequence
  Synthetic
gcccaugaagaccucauagaaa

SEQ ID NO: 1266 - RNA, 22 nt, Artificial Sequence
  Synthetic
gcuuguccugugauuucuauga

SEQ ID NO: 1267 - RNA, 22 nt, Artificial Sequence
  Synthetic
ggcuuguccugugauuucuaug

SEQ ID NO: 1268 - RNA, 22 nt, Artificial Sequence
  Synthetic
ggugccaaaggcuuguccugug

SEQ ID NO: 1269 - RNA, 22 nt, Artificial Sequence
  Synthetic
guccugugauuucuaugagguc

SEQ ID NO: 1270 - RNA, 22 nt, Artificial Sequence
  Synthetic
gugccaaaggcuuguccuguga

SEQ ID NO: 1271 - RNA, 22 nt, Artificial Sequence
  Synthetic
guuuggugccaaaggcuugucc

SEQ ID NO: 1272 - RNA, 22 nt, Artificial Sequence
  Synthetic
uagaaaucacaggacaagccuu

SEQ ID NO: 1273 - RNA, 22 nt, Artificial Sequence
  Synthetic
ucacaggacaagccuuuggcac

SEQ ID NO: 1274 - RNA, 22 nt, Artificial Sequence
  Synthetic
ucauagaaaucacaggacaagc

SEQ ID NO: 1275 - RNA, 22 nt, Artificial Sequence
  Synthetic
uccugugauuucuaugaggucu

SEQ ID NO: 1276 - RNA, 22 nt, Artificial Sequence
  Synthetic
ugaagaccucauagaaaucaca

SEQ ID NO: 1277 - RNA, 22 nt, Artificial Sequence
  Synthetic
ugccaaaggcuuguccugugau

SEQ ID NO: 1278 - RNA, 22 nt, Artificial Sequence
  Synthetic
uggugccaaaggcuuguccugu

SEQ ID NO: 1279 - RNA, 22 nt, Artificial Sequence
  Synthetic
uguccugugauuucuaugaggu

SEQ ID NO: 1280 - RNA, 22 nt, Artificial Sequence
  Synthetic
ugugauuucuaugaggucuuca

SEQ ID NO: 1281 - RNA, 22 nt, Artificial Sequence
  Synthetic
uguuuggugccaaaggcuuguc

SEQ ID NO: 1282 - RNA, 22 nt, Artificial Sequence
  Synthetic
uuggugccaaaggcuuguccug

SEQ ID NO: 1283 - RNA, 22 nt, Artificial Sequence
  Synthetic
uuguccugugauuucuaugagg

SEQ ID NO: 1284 - RNA, 22 nt, Artificial Sequence
  Synthetic
uuuggugccaaaggcuuguccu

SEQ ID NO: 1285 - RNA, 20 nt, Artificial Sequence
  Synthetic
aaaggcuucuccuaugauuu

SEQ ID NO: 1286 - RNA, 20 nt, Artificial Sequence
  Synthetic
aaaucauaggagaagccuuu

SEQ ID NO: 1287 - RNA, 20 nt, Artificial Sequence
  Synthetic
aagaccucauagaaaucaua

SEQ ID NO: 1288 - RNA, 20 nt, Artificial Sequence
  Synthetic
aaggcuucuccuaugauuuc

SEQ ID NO: 1289 - RNA, 20 nt, Artificial Sequence
  Synthetic
aaucauaggagaagccuuug

SEQ ID NO: 1290 - RNA, 20 nt, Artificial Sequence
  Synthetic
accucauagaaaucauagga

SEQ ID NO: 1291 - RNA, 20 nt, Artificial Sequence
  Synthetic
agaaaucauaggagaagccu

SEQ ID NO: 1292 - RNA, 20 nt, Artificial Sequence
  Synthetic
agaagccuuuggcaccaaac

SEQ ID NO: 1293 - RNA, 20 nt, Artificial Sequence
  Synthetic
agaccucauagaaaucauag

SEQ ID NO: 1294 - RNA, 20 nt, Artificial Sequence
  Synthetic
aggagaagccuuuggcacca

SEQ ID NO: 1295 - RNA, 20 nt, Artificial Sequence
  Synthetic
aggcuucuccuaugauuucu

SEQ ID NO: 1296 - RNA, 20 nt, Artificial Sequence
  Synthetic
auagaaaucauaggagaagc

SEQ ID NO: 1297 - RNA, 20 nt, Artificial Sequence
  Synthetic
auaggagaagccuuuggcac

SEQ ID NO: 1298 - RNA, 20 nt, Artificial Sequence
  Synthetic
aucauaggagaagccuuugg

SEQ ID NO: 1299 - RNA, 20 nt, Artificial Sequence
  Synthetic
auguuuggugccaaaggcuu

SEQ ID NO: 1300 - RNA, 20 nt, Artificial Sequence
  Synthetic
caaaggcuucuccuaugauu

SEQ ID NO: 1301 - RNA, 20 nt, Artificial Sequence
  Synthetic
cauagaaaucauaggagaag

SEQ ID NO: 1302 - RNA, 20 nt, Artificial Sequence
  Synthetic
cauaggagaagccuuuggca

SEQ ID NO: 1303 - RNA, 20 nt, Artificial Sequence
  Synthetic
ccaaaggcuucuccuaugau

SEQ ID NO: 1304 - RNA, 20 nt, Artificial Sequence
  Synthetic
ccucauagaaaucauaggag

SEQ ID NO: 1305 - RNA, 20 nt, Artificial Sequence
  Synthetic
cuauguuuggugccaaaggc

SEQ ID NO: 1306 - RNA, 20 nt, Artificial Sequence
  Synthetic
cucauagaaaucauaggaga

SEQ ID NO: 1307 - RNA, 20 nt, Artificial Sequence
  Synthetic
cuucuccuaugauuucuaug

SEQ ID NO: 1308 - RNA, 20 nt, Artificial Sequence
  Synthetic
gaaaucauaggagaagccuu

SEQ ID NO: 1309 - RNA, 20 nt, Artificial Sequence
  Synthetic
gaccucauagaaaucauagg

SEQ ID NO: 1310 - RNA, 20 nt, Artificial Sequence
  Synthetic
gagaagccuuuggcaccaaa

SEQ ID NO: 1311 - RNA, 20 nt, Artificial Sequence
  Synthetic
gccaaaggcuucuccuauga

SEQ ID NO: 1312 - RNA, 20 nt, Artificial Sequence
  Synthetic
gcuauguuuggugccaaagg

SEQ ID NO: 1313 - RNA, 20 nt, Artificial Sequence
  Synthetic
gcuucuccuaugauuucuau

SEQ ID NO: 1314 - RNA, 20 nt, Artificial Sequence
  Synthetic
ggagaagccuuuggcaccaa

SEQ ID NO: 1315 - RNA, 20 nt, Artificial Sequence
  Synthetic
ggcuucuccuaugauuucua

SEQ ID NO: 1316 - RNA, 20 nt, Artificial Sequence
  Synthetic
ggugccaaaggcuucuccua

SEQ ID NO: 1317 - RNA, 20 nt, Artificial Sequence
  Synthetic
gugccaaaggcuucuccuau

SEQ ID NO: 1318 - RNA, 20 nt, Artificial Sequence
  Synthetic
guuuggugccaaaggcuucu

SEQ ID NO: 1319 - RNA, 20 nt, Artificial Sequence
  Synthetic
uagaaaucauaggagaagcc

SEQ ID NO: 1320 - RNA, 20 nt, Artificial Sequence
  Synthetic
uaggagaagccuuuggcacc

SEQ ID NO: 1321 - RNA, 20 nt, Artificial Sequence
  Synthetic
uauguuuggugccaaaggcu

SEQ ID NO: 1322 - RNA, 20 nt, Artificial Sequence
  Synthetic
ucauagaaaucauaggagaa

SEQ ID NO: 1323 - RNA, 20 nt, Artificial Sequence
  Synthetic
ucauaggagaagccuuuggc

SEQ ID NO: 1324 - RNA, 20 nt, Artificial Sequence
  Synthetic
ucuccuaugauuucuaugag

SEQ ID NO: 1325 - RNA, 20 nt, Artificial Sequence
  Synthetic
ugccaaaggcuucuccuaug

SEQ ID NO: 1326 - RNA, 20 nt, Artificial Sequence
  Synthetic
uggugccaaaggcuucuccu

SEQ ID NO: 1327 - RNA, 20 nt, Artificial Sequence
  Synthetic
uguuuggugccaaaggcuuc

SEQ ID NO: 1328 - RNA, 20 nt, Artificial Sequence
  Synthetic
uucuccuaugauuucuauga

SEQ ID NO: 1329 - RNA, 20 nt, Artificial Sequence
  Synthetic
uuggugccaaaggcuucucc

SEQ ID NO: 1330 - RNA, 20 nt, Artificial Sequence
  Synthetic
uuuggugccaaaggcuucuc

SEQ ID NO: 1331 - RNA, 21 nt, Artificial Sequence
  Synthetic
aaaggcuucuccuaugauuuc

SEQ ID NO: 1332 - RNA, 21 nt, Artificial Sequence
  Synthetic
aaaucauaggagaagccuuug

SEQ ID NO: 1333 - RNA, 21 nt, Artificial Sequence
  Synthetic
aagaccucauagaaaucauag

SEQ ID NO: 1334 - RNA, 21 nt, Artificial Sequence
  Synthetic
aaggcuucuccuaugauuucu

SEQ ID NO: 1335 - RNA, 21 nt, Artificial Sequence
  Synthetic
aaucauaggagaagccuuugg

SEQ ID NO: 1336 - RNA, 21 nt, Artificial Sequence
  Synthetic
accucauagaaaucauaggag

SEQ ID NO: 1337 - RNA, 21 nt, Artificial Sequence
  Synthetic
agaaaucauaggagaagccuu

SEQ ID NO: 1338 - RNA, 21 nt, Artificial Sequence
  Synthetic
agaagccuuuggcaccaaaca

SEQ ID NO: 1339 - RNA, 21 nt, Artificial Sequence
  Synthetic
agaccucauagaaaucauagg

SEQ ID NO: 1340 - RNA, 21 nt, Artificial Sequence
  Synthetic
agcuauguuuggugccaaagg

SEQ ID NO: 1341 - RNA, 21 nt, Artificial Sequence
  Synthetic
aggagaagccuuuggcaccaa

SEQ ID NO: 1342 - RNA, 21 nt, Artificial Sequence
  Synthetic
aggcuucuccuaugauuucua

SEQ ID NO: 1343 - RNA, 21 nt, Artificial Sequence
  Synthetic
auagaaaucauaggagaagcc

SEQ ID NO: 1344 - RNA, 21 nt, Artificial Sequence
  Synthetic
auaggagaagccuuuggcacc

SEQ ID NO: 1345 - RNA, 21 nt, Artificial Sequence
  Synthetic
aucauaggagaagccuuuggc

SEQ ID NO: 1346 - RNA, 21 nt, Artificial Sequence
  Synthetic
auguuuggugccaaaggcuuc

SEQ ID NO: 1347 - RNA, 21 nt, Artificial Sequence
  Synthetic
caaaggcuucuccuaugauuu

SEQ ID NO: 1348 - RNA, 21 nt, Artificial Sequence
  Synthetic
cauagaaaucauaggagaagc

SEQ ID NO: 1349 - RNA, 21 nt, Artificial Sequence
  Synthetic
cauaggagaagccuuuggcac

SEQ ID NO: 1350 - RNA, 21 nt, Artificial Sequence
  Synthetic
ccaaaggcuucuccuaugauu

SEQ ID NO: 1351 - RNA, 21 nt, Artificial Sequence
  Synthetic
ccucauagaaaucauaggaga

SEQ ID NO: 1352 - RNA, 21 nt, Artificial Sequence
  Synthetic
cuauguuuggugccaaaggcu

SEQ ID NO: 1353 - RNA, 21 nt, Artificial Sequence
  Synthetic
cucauagaaaucauaggagaa

SEQ ID NO: 1354 - RNA, 21 nt, Artificial Sequence
  Synthetic
cuucuccuaugauuucuauga

SEQ ID NO: 1355 - RNA, 21 nt, Artificial Sequence
  Synthetic
gaaaucauaggagaagccuuu

SEQ ID NO: 1356 - RNA, 21 nt, Artificial Sequence
  Synthetic
gaagaccucauagaaaucaua

SEQ ID NO: 1357 - RNA, 21 nt, Artificial Sequence
  Synthetic
gaccucauagaaaucauagga

SEQ ID NO: 1358 - RNA, 21 nt, Artificial Sequence
  Synthetic
gagaagccuuuggcaccaaac

SEQ ID NO: 1359 - RNA, 21 nt, Artificial Sequence
  Synthetic
gccaaaggcuucuccuaugau

SEQ ID NO: 1360 - RNA, 21 nt, Artificial Sequence
  Synthetic
gcuauguuuggugccaaaggc

SEQ ID NO: 1361 - RNA, 21 nt, Artificial Sequence
  Synthetic
gcuucuccuaugauuucuaug

SEQ ID NO: 1362 - RNA, 21 nt, Artificial Sequence
  Synthetic
ggagaagccuuuggcaccaaa

SEQ ID NO: 1363 - RNA, 21 nt, Artificial Sequence
  Synthetic
ggcuucuccuaugauuucuau

SEQ ID NO: 1364 - RNA, 21 nt, Artificial Sequence
  Synthetic
ggugccaaaggcuucuccuau

SEQ ID NO: 1365 - RNA, 21 nt, Artificial Sequence
  Synthetic
gugccaaaggcuucuccuaug

SEQ ID NO: 1366 - RNA, 21 nt, Artificial Sequence
  Synthetic
guuuggugccaaaggcuucuc

SEQ ID NO: 1367 - RNA, 21 nt, Artificial Sequence
  Synthetic
uagaaaucauaggagaagccu

SEQ ID NO: 1368 - RNA, 21 nt, Artificial Sequence
  Synthetic
uaggagaagccuuuggcacca

SEQ ID NO: 1369 - RNA, 21 nt, Artificial Sequence
  Synthetic
uauguuuggugccaaaggcuu

SEQ ID NO: 1370 - RNA, 21 nt, Artificial Sequence
  Synthetic
ucauagaaaucauaggagaag

SEQ ID NO: 1371 - RNA, 21 nt, Artificial Sequence
  Synthetic
ucauaggagaagccuuuggca

SEQ ID NO: 1372 - RNA, 21 nt, Artificial Sequence
  Synthetic
ucuccuaugauuucuaugagg

SEQ ID NO: 1373 - RNA, 21 nt, Artificial Sequence
  Synthetic
ugccaaaggcuucuccuauga

SEQ ID NO: 1374 - RNA, 21 nt, Artificial Sequence
  Synthetic
uggugccaaaggcuucuccua

SEQ ID NO: 1375 - RNA, 21 nt, Artificial Sequence
  Synthetic
uguuuggugccaaaggcuucu

SEQ ID NO: 1376 - RNA, 21 nt, Artificial Sequence
  Synthetic
uucuccuaugauuucuaugag

SEQ ID NO: 1377 - RNA, 21 nt, Artificial Sequence
  Synthetic
uuggugccaaaggcuucuccu

SEQ ID NO: 1378 - RNA, 21 nt, Artificial Sequence
  Synthetic
uuuggugccaaaggcuucucc

SEQ ID NO: 1379 - RNA, 22 nt, Artificial Sequence
  Synthetic
aaaggcuucuccuaugauuucu

SEQ ID NO: 1380 - RNA, 22 nt, Artificial Sequence
  Synthetic
aaaucauaggagaagccuuugg

SEQ ID NO: 1381 - RNA, 22 nt, Artificial Sequence
  Synthetic
aagaccucauagaaaucauagg

SEQ ID NO: 1382 - RNA, 22 nt, Artificial Sequence
  Synthetic
aaggcuucuccuaugauuucua

SEQ ID NO: 1383 - RNA, 22 nt, Artificial Sequence
  Synthetic
aaucauaggagaagccuuuggc

SEQ ID NO: 1384 - RNA, 22 nt, Artificial Sequence
  Synthetic
accucauagaaaucauaggaga

SEQ ID NO: 1385 - RNA, 22 nt, Artificial Sequence
  Synthetic
agaaaucauaggagaagccuuu

SEQ ID NO: 1386 - RNA, 22 nt, Artificial Sequence
  Synthetic
agaagccuuuggcaccaaacau

SEQ ID NO: 1387 - RNA, 22 nt, Artificial Sequence
  Synthetic
agaccucauagaaaucauagga

SEQ ID NO: 1388 - RNA, 22 nt, Artificial Sequence
  Synthetic
agcuauguuuggugccaaaggc

SEQ ID NO: 1389 - RNA, 22 nt, Artificial Sequence
  Synthetic
aggagaagccuuuggcaccaaa

SEQ ID NO: 1390 - RNA, 22 nt, Artificial Sequence
  Synthetic
aggcuucuccuaugauuucuau

SEQ ID NO: 1391 - RNA, 22 nt, Artificial Sequence
  Synthetic
auagaaaucauaggagaagccu

SEQ ID NO: 1392 - RNA, 22 nt, Artificial Sequence
  Synthetic
auaggagaagccuuuggcacca

SEQ ID NO: 1393 - RNA, 22 nt, Artificial Sequence
  Synthetic
aucauaggagaagccuuuggca

SEQ ID NO: 1394 - RNA, 22 nt, Artificial Sequence
  Synthetic
auguuuggugccaaaggcuucu

SEQ ID NO: 1395 - RNA, 22 nt, Artificial Sequence
  Synthetic
caaaggcuucuccuaugauuuc

SEQ ID NO: 1396 - RNA, 22 nt, Artificial Sequence
  Synthetic
cagcuauguuuggugccaaagg

SEQ ID NO: 1397 - RNA, 22 nt, Artificial Sequence
  Synthetic
cauagaaaucauaggagaagcc

SEQ ID NO: 1398 - RNA, 22 nt, Artificial Sequence
  Synthetic
cauaggagaagccuuuggcacc

SEQ ID NO: 1399 - RNA, 22 nt, Artificial Sequence
  Synthetic
ccaaaggcuucuccuaugauuu

SEQ ID NO: 1400 - RNA, 22 nt, Artificial Sequence
  Synthetic
ccucauagaaaucauaggagaa

SEQ ID NO: 1401 - RNA, 22 nt, Artificial Sequence
  Synthetic
cuauguuuggugccaaaggcuu

SEQ ID NO: 1402 - RNA, 22 nt, Artificial Sequence
  Synthetic
cucauagaaaucauaggagaag

SEQ ID NO: 1403 - RNA, 22 nt, Artificial Sequence
  Synthetic
cuucuccuaugauuucuaugag

SEQ ID NO: 1404 - RNA, 22 nt, Artificial Sequence
  Synthetic
gaaaucauaggagaagccuuug

SEQ ID NO: 1405 - RNA, 22 nt, Artificial Sequence
  Synthetic
gaagaccucauagaaaucauag

SEQ ID NO: 1406 - RNA, 22 nt, Artificial Sequence
  Synthetic
gaccucauagaaaucauaggag

SEQ ID NO: 1407 - RNA, 22 nt, Artificial Sequence
  Synthetic
gagaagccuuuggcaccaaaca

SEQ ID NO: 1408 - RNA, 22 nt, Artificial Sequence
  Synthetic
gccaaaggcuucuccuaugauu

SEQ ID NO: 1409 - RNA, 22 nt, Artificial Sequence
  Synthetic
gcuauguuuggugccaaaggcu

SEQ ID NO: 1410 - RNA, 22 nt, Artificial Sequence
  Synthetic
gcuucuccuaugauuucuauga

SEQ ID NO: 1411 - RNA, 22 nt, Artificial Sequence
  Synthetic
ggagaagccuuuggcaccaaac

SEQ ID NO: 1412 - RNA, 22 nt, Artificial Sequence
  Synthetic
ggcuucuccuaugauuucuaug

SEQ ID NO: 1413 - RNA, 22 nt, Artificial Sequence
  Synthetic
ggugccaaaggcuucuccuaug

SEQ ID NO: 1414 - RNA, 22 nt, Artificial Sequence
  Synthetic
gugccaaaggcuucuccuauga

SEQ ID NO: 1415 - RNA, 22 nt, Artificial Sequence
  Synthetic
guuuggugccaaaggcuucucc

SEQ ID NO: 1416 - RNA, 22 nt, Artificial Sequence
  Synthetic
uagaaaucauaggagaagccuu

SEQ ID NO: 1417 - RNA, 22 nt, Artificial Sequence
  Synthetic
uaggagaagccuuuggcaccaa

SEQ ID NO: 1418 - RNA, 22 nt, Artificial Sequence
  Synthetic
uauguuuggugccaaaggcuuc

SEQ ID NO: 1419 - RNA, 22 nt, Artificial Sequence
  Synthetic
ucauagaaaucauaggagaagc

SEQ ID NO: 1420 - RNA, 22 nt, Artificial Sequence
  Synthetic
ucauaggagaagccuuuggcac

SEQ ID NO: 1421 - RNA, 22 nt, Artificial Sequence
  Synthetic
ucuccuaugauuucuaugaggu

SEQ ID NO: 1422 - RNA, 22 nt, Artificial Sequence
  Synthetic
ugaagaccucauagaaaucaua

SEQ ID NO: 1423 - RNA, 22 nt, Artificial Sequence
  Synthetic
ugccaaaggcuucuccuaugau

SEQ ID NO: 1424 - RNA, 22 nt, Artificial Sequence
  Synthetic
uggugccaaaggcuucuccuau

SEQ ID NO: 1425 - RNA, 22 nt, Artificial Sequence
  Synthetic
uguuuggugccaaaggcuucuc

SEQ ID NO: 1426 - RNA, 22 nt, Artificial Sequence
  Synthetic
uucuccuaugauuucuaugagg

SEQ ID NO: 1427 - RNA, 22 nt, Artificial Sequence
  Synthetic
uuggugccaaaggcuucuccua

SEQ ID NO: 1428 - RNA, 22 nt, Artificial Sequence
  Synthetic
uuuggugccaaaggcuucuccu

SEQ ID NO: 1429 - RNA, 20 nt, Artificial Sequence
  Synthetic
aaaucauaggacaagcauuu

SEQ ID NO: 1430 - RNA, 20 nt, Artificial Sequence
  Synthetic
aaaugcuuguccuaugauuu

SEQ ID NO: 1431 - RNA, 20 nt, Artificial Sequence
  Synthetic
aagcauuuggcaccaaacau

SEQ ID NO: 1432 - RNA, 20 nt, Artificial Sequence
  Synthetic
aaucauaggacaagcauuug

SEQ ID NO: 1433 - RNA, 20 nt, Artificial Sequence
  Synthetic
aaugcuuguccuaugauuuc

SEQ ID NO: 1434 - RNA, 20 nt, Artificial Sequence
  Synthetic
acaagcauuuggcaccaaac

SEQ ID NO: 1435 - RNA, 20 nt, Artificial Sequence
  Synthetic
acccagcuauguuuggugcc

SEQ ID NO: 1436 - RNA, 20 nt, Artificial Sequence
  Synthetic
agaaaucauaggacaagcau

SEQ ID NO: 1437 - RNA, 20 nt, Artificial Sequence
  Synthetic
agcauuuggcaccaaacaua

SEQ ID NO: 1438 - RNA, 20 nt, Artificial Sequence
  Synthetic
agcuauguuuggugccaaau

SEQ ID NO: 1439 - RNA, 20 nt, Artificial Sequence
  Synthetic
aggacaagcauuuggcacca

SEQ ID NO: 1440 - RNA, 20 nt, Artificial Sequence
  Synthetic
auagaaaucauaggacaagc

SEQ ID NO: 1441 - RNA, 20 nt, Artificial Sequence
  Synthetic
auaggacaagcauuuggcac

SEQ ID NO: 1442 - RNA, 20 nt, Artificial Sequence
  Synthetic
aucauaggacaagcauuugg

SEQ ID NO: 1443 - RNA, 20 nt, Artificial Sequence
  Synthetic
augcuuguccuaugauuucu

SEQ ID NO: 1444 - RNA, 20 nt, Artificial Sequence
  Synthetic
auguuuggugccaaaugcuu

SEQ ID NO: 1445 - RNA, 20 nt, Artificial Sequence
  Synthetic
caaaugcuuguccuaugauu

SEQ ID NO: 1446 - RNA, 20 nt, Artificial Sequence
  Synthetic
caagcauuuggcaccaaaca

SEQ ID NO: 1447 - RNA, 20 nt, Artificial Sequence
  Synthetic
cagcuauguuuggugccaaa

SEQ ID NO: 1448 - RNA, 20 nt, Artificial Sequence
  Synthetic
cauagaaaucauaggacaag

SEQ ID NO: 1449 - RNA, 20 nt, Artificial Sequence
  Synthetic
cauaggacaagcauuuggca

SEQ ID NO: 1450 - RNA, 20 nt, Artificial Sequence
  Synthetic
cauuuggcaccaaacauagc

SEQ ID NO: 1451 - RNA, 20 nt, Artificial Sequence
  Synthetic
ccaaaugcuuguccuaugau

SEQ ID NO: 1452 - RNA, 20 nt, Artificial Sequence
  Synthetic
ccagcuauguuuggugccaa

SEQ ID NO: 1453 - RNA, 20 nt, Artificial Sequence
  Synthetic
cccagcuauguuuggugcca

SEQ ID NO: 1454 - RNA, 20 nt, Artificial Sequence
  Synthetic
cuauguuuggugccaaaugc

SEQ ID NO: 1455 - RNA, 20 nt, Artificial Sequence
  Synthetic
cucauagaaaucauaggaca

SEQ ID NO: 1456 - RNA, 20 nt, Artificial Sequence
  Synthetic
gaaaucauaggacaagcauu

SEQ ID NO: 1457 - RNA, 20 nt, Artificial Sequence
  Synthetic
gacaagcauuuggcaccaaa

SEQ ID NO: 1458 - RNA, 20 nt, Artificial Sequence
  Synthetic
gcauuuggcaccaaacauag

SEQ ID NO: 1459 - RNA, 20 nt, Artificial Sequence
  Synthetic
gccaaaugcuuguccuauga

SEQ ID NO: 1460 - RNA, 20 nt, Artificial Sequence
  Synthetic
gcuauguuuggugccaaaug

SEQ ID NO: 1461 - RNA, 20 nt, Artificial Sequence
  Synthetic
ggacaagcauuuggcaccaa

SEQ ID NO: 1462 - RNA, 20 nt, Artificial Sequence
  Synthetic
ggugccaaaugcuuguccua

SEQ ID NO: 1463 - RNA, 20 nt, Artificial Sequence
  Synthetic
gugccaaaugcuuguccuau

SEQ ID NO: 1464 - RNA, 20 nt, Artificial Sequence
  Synthetic
guuuggugccaaaugcuugu

SEQ ID NO: 1465 - RNA, 20 nt, Artificial Sequence
  Synthetic
uagaaaucauaggacaagca

SEQ ID NO: 1466 - RNA, 20 nt, Artificial Sequence
  Synthetic
uaggacaagcauuuggcacc

SEQ ID NO: 1467 - RNA, 20 nt, Artificial Sequence
  Synthetic
uauguuuggugccaaaugcu

SEQ ID NO: 1468 - RNA, 20 nt, Artificial Sequence
  Synthetic
ucauagaaaucauaggacaa

SEQ ID NO: 1469 - RNA, 20 nt, Artificial Sequence
  Synthetic
ucauaggacaagcauuuggc

SEQ ID NO: 1470 - RNA, 20 nt, Artificial Sequence
  Synthetic
ugccaaaugcuuguccuaug

SEQ ID NO: 1471 - RNA, 20 nt, Artificial Sequence
  Synthetic
uggugccaaaugcuuguccu

SEQ ID NO: 1472 - RNA, 20 nt, Artificial Sequence
  Synthetic
uguuuggugccaaaugcuug

SEQ ID NO: 1473 - RNA, 20 nt, Artificial Sequence
  Synthetic
uuggugccaaaugcuugucc

SEQ ID NO: 1474 - RNA, 20 nt, Artificial Sequence
  Synthetic
uuuggugccaaaugcuuguc

SEQ ID NO: 1475 - RNA, 21 nt, Artificial Sequence
  Synthetic
aaaucauaggacaagcauuug

SEQ ID NO: 1476 - RNA, 21 nt, Artificial Sequence
  Synthetic
aaaugcuuguccuaugauuuc

SEQ ID NO: 1477 - RNA, 21 nt, Artificial Sequence
  Synthetic
aagcauuuggcaccaaacaua

SEQ ID NO: 1478 - RNA, 21 nt, Artificial Sequence
  Synthetic
aaucauaggacaagcauuugg

SEQ ID NO: 1479 - RNA, 21 nt, Artificial Sequence
  Synthetic
aaugcuuguccuaugauuucu

SEQ ID NO: 1480 - RNA, 21 nt, Artificial Sequence
  Synthetic
acaagcauuuggcaccaaaca

SEQ ID NO: 1481 - RNA, 21 nt, Artificial Sequence
  Synthetic
acccagcuauguuuggugcca

SEQ ID NO: 1482 - RNA, 21 nt, Artificial Sequence
  Synthetic
agaaaucauaggacaagcauu

SEQ ID NO: 1483 - RNA, 21 nt, Artificial Sequence
  Synthetic
agcauuuggcaccaaacauag

SEQ ID NO: 1484 - RNA, 21 nt, Artificial Sequence
  Synthetic
agcuauguuuggugccaaaug

SEQ ID NO: 1485 - RNA, 21 nt, Artificial Sequence
  Synthetic
aggacaagcauuuggcaccaa

SEQ ID NO: 1486 - RNA, 21 nt, Artificial Sequence
  Synthetic
auagaaaucauaggacaagca

SEQ ID NO: 1487 - RNA, 21 nt, Artificial Sequence
  Synthetic
auaggacaagcauuuggcacc

SEQ ID NO: 1488 - RNA, 21 nt, Artificial Sequence
  Synthetic
aucauaggacaagcauuuggc

SEQ ID NO: 1489 - RNA, 21 nt, Artificial Sequence
  Synthetic
augcuuguccuaugauuucua

SEQ ID NO: 1490 - RNA, 21 nt, Artificial Sequence
  Synthetic
auguuuggugccaaaugcuug

SEQ ID NO: 1491 - RNA, 21 nt, Artificial Sequence
  Synthetic
caaaugcuuguccuaugauuu

SEQ ID NO: 1492 - RNA, 21 nt, Artificial Sequence
  Synthetic
caagcauuuggcaccaaacau

SEQ ID NO: 1493 - RNA, 21 nt, Artificial Sequence
  Synthetic
cagcuauguuuggugccaaau

SEQ ID NO: 1494 - RNA, 21 nt, Artificial Sequence
  Synthetic
cauagaaaucauaggacaagc

SEQ ID NO: 1495 - RNA, 21 nt, Artificial Sequence
  Synthetic
cauaggacaagcauuuggcac

SEQ ID NO: 1496 - RNA, 21 nt, Artificial Sequence
  Synthetic
cauuuggcaccaaacauagcu

SEQ ID NO: 1497 - RNA, 21 nt, Artificial Sequence
  Synthetic
ccaaaugcuuguccuaugauu

SEQ ID NO: 1498 - RNA, 21 nt, Artificial Sequence
  Synthetic
ccagcuauguuuggugccaaa

SEQ ID NO: 1499 - RNA, 21 nt, Artificial Sequence
  Synthetic
cccagcuauguuuggugccaa

SEQ ID NO: 1500 - RNA, 21 nt, Artificial Sequence
  Synthetic
ccucauagaaaucauaggaca

SEQ ID NO: 1501 - RNA, 21 nt, Artificial Sequence
  Synthetic
cuauguuuggugccaaaugcu

SEQ ID NO: 1502 - RNA, 21 nt, Artificial Sequence
  Synthetic
cucauagaaaucauaggacaa

SEQ ID NO: 1503 - RNA, 21 nt, Artificial Sequence
  Synthetic
gaaaucauaggacaagcauuu

SEQ ID NO: 1504 - RNA, 21 nt, Artificial Sequence
  Synthetic
gacaagcauuuggcaccaaac

SEQ ID NO: 1505 - RNA, 21 nt, Artificial Sequence
  Synthetic
gacccagcuauguuuggugcc

SEQ ID NO: 1506 - RNA, 21 nt, Artificial Sequence
  Synthetic
gcauuuggcaccaaacauagc

SEQ ID NO: 1507 - RNA, 21 nt, Artificial Sequence
  Synthetic
gccaaaugcuuguccuaugau

SEQ ID NO: 1508 - RNA, 21 nt, Artificial Sequence
  Synthetic
gcuauguuuggugccaaaugc

SEQ ID NO: 1509 - RNA, 21 nt, Artificial Sequence
  Synthetic
ggacaagcauuuggcaccaaa

SEQ ID NO: 1510 - RNA, 21 nt, Artificial Sequence
  Synthetic
ggugccaaaugcuuguccuau

SEQ ID NO: 1511 - RNA, 21 nt, Artificial Sequence
  Synthetic
gugccaaaugcuuguccuaug

SEQ ID NO: 1512 - RNA, 21 nt, Artificial Sequence
  Synthetic
guuuggugccaaaugcuuguc

SEQ ID NO: 1513 - RNA, 21 nt, Artificial Sequence
  Synthetic
uagaaaucauaggacaagcau

SEQ ID NO: 1514 - RNA, 21 nt, Artificial Sequence
  Synthetic
uaggacaagcauuuggcacca

SEQ ID NO: 1515 - RNA, 21 nt, Artificial Sequence
  Synthetic
uauguuuggugccaaaugcuu

SEQ ID NO: 1516 - RNA, 21 nt, Artificial Sequence
  Synthetic
ucauagaaaucauaggacaag

SEQ ID NO: 1517 - RNA, 21 nt, Artificial Sequence
  Synthetic
ucauaggacaagcauuuggca

SEQ ID NO: 1518 - RNA, 21 nt, Artificial Sequence
  Synthetic
ugccaaaugcuuguccuauga

SEQ ID NO: 1519 - RNA, 21 nt, Artificial Sequence
  Synthetic
uggugccaaaugcuuguccua

SEQ ID NO: 1520 - RNA, 21 nt, Artificial Sequence
  Synthetic
uguuuggugccaaaugcuugu

SEQ ID NO: 1521 - RNA, 21 nt, Artificial Sequence
  Synthetic
uuggugccaaaugcuuguccu

SEQ ID NO: 1522 - RNA, 21 nt, Artificial Sequence
  Synthetic
uuuggugccaaaugcuugucc

SEQ ID NO: 1523 - RNA, 22 nt, Artificial Sequence
  Synthetic
aaaucauaggacaagcauuugg

SEQ ID NO: 1524 - RNA, 22 nt, Artificial Sequence
  Synthetic
aaaugcuuguccuaugauuucu

SEQ ID NO: 1525 - RNA, 22 nt, Artificial Sequence
  Synthetic
aagcauuuggcaccaaacauag

SEQ ID NO: 1526 - RNA, 22 nt, Artificial Sequence
  Synthetic
aaucauaggacaagcauuuggc

SEQ ID NO: 1527 - RNA, 22 nt, Artificial Sequence
  Synthetic
aaugcuuguccuaugauuucua

SEQ ID NO: 1528 - RNA, 22 nt, Artificial Sequence
  Synthetic
acaagcauuuggcaccaaacau

SEQ ID NO: 1529 - RNA, 22 nt, Artificial Sequence
  Synthetic
acccagcuauguuuggugccaa

SEQ ID NO: 1530 - RNA, 22 nt, Artificial Sequence
  Synthetic
accucauagaaaucauaggaca

SEQ ID NO: 1531 - RNA, 22 nt, Artificial Sequence
  Synthetic
agaaaucauaggacaagcauuu

SEQ ID NO: 1532 - RNA, 22 nt, Artificial Sequence
  Synthetic
agcauuuggcaccaaacauagc

SEQ ID NO: 1533 - RNA, 22 nt, Artificial Sequence
  Synthetic
agcuauguuuggugccaaaugc

SEQ ID NO: 1534 - RNA, 22 nt, Artificial Sequence
  Synthetic
aggacaagcauuuggcaccaaa

SEQ ID NO: 1535 - RNA, 22 nt, Artificial Sequence
  Synthetic
auagaaaucauaggacaagcau

SEQ ID NO: 1536 - RNA, 22 nt, Artificial Sequence
  Synthetic
auaggacaagcauuuggcacca

SEQ ID NO: 1537 - RNA, 22 nt, Artificial Sequence
  Synthetic
aucauaggacaagcauuuggca

SEQ ID NO: 1538 - RNA, 22 nt, Artificial Sequence
  Synthetic
augcuuguccuaugauuucuau

SEQ ID NO: 1539 - RNA, 22 nt, Artificial Sequence
  Synthetic
auguuuggugccaaaugcuugu

SEQ ID NO: 1540 - RNA, 22 nt, Artificial Sequence
  Synthetic
caaaugcuuguccuaugauuuc

SEQ ID NO: 1541 - RNA, 22 nt, Artificial Sequence
  Synthetic
caagcauuuggcaccaaacaua

SEQ ID NO: 1542 - RNA, 22 nt, Artificial Sequence
  Synthetic
cagcuauguuuggugccaaaug

SEQ ID NO: 1543 - RNA, 22 nt, Artificial Sequence
  Synthetic
cauagaaaucauaggacaagca

SEQ ID NO: 1544 - RNA, 22 nt, Artificial Sequence
  Synthetic
cauaggacaagcauuuggcacc

SEQ ID NO: 1545 - RNA, 22 nt, Artificial Sequence
  Synthetic
cauuuggcaccaaacauagcug

SEQ ID NO: 1546 - RNA, 22 nt, Artificial Sequence
  Synthetic
ccaaaugcuuguccuaugauuu

SEQ ID NO: 1547 - RNA, 22 nt, Artificial Sequence
  Synthetic
ccagcuauguuuggugccaaau

SEQ ID NO: 1548 - RNA, 22 nt, Artificial Sequence
  Synthetic
cccagcuauguuuggugccaaa

SEQ ID NO: 1549 - RNA, 22 nt, Artificial Sequence
  Synthetic
ccucauagaaaucauaggacaa

SEQ ID NO: 1550 - RNA, 22 nt, Artificial Sequence
  Synthetic
cuauguuuggugccaaaugcuu

SEQ ID NO: 1551 - RNA, 22 nt, Artificial Sequence
  Synthetic
cucauagaaaucauaggacaag

SEQ ID NO: 1552 - RNA, 22 nt, Artificial Sequence
  Synthetic
gaaaucauaggacaagcauuug

SEQ ID NO: 1553 - RNA, 22 nt, Artificial Sequence
  Synthetic
gacaagcauuuggcaccaaaca

SEQ ID NO: 1554 - RNA, 22 nt, Artificial Sequence
  Synthetic
gacccagcuauguuuggugcca

SEQ ID NO: 1555 - RNA, 22 nt, Artificial Sequence
  Synthetic
gcauuuggcaccaaacauagcu

SEQ ID NO: 1556 - RNA, 22 nt, Artificial Sequence
  Synthetic
gccaaaugcuuguccuaugauu

SEQ ID NO: 1557 - RNA, 22 nt, Artificial Sequence
  Synthetic
gcuauguuuggugccaaaugcu

SEQ ID NO: 1558 - RNA, 22 nt, Artificial Sequence
  Synthetic
ggacaagcauuuggcaccaaac

SEQ ID NO: 1559 - RNA, 22 nt, Artificial Sequence
  Synthetic
ggugccaaaugcuuguccuaug

SEQ ID NO: 1560 - RNA, 22 nt, Artificial Sequence
  Synthetic
gugccaaaugcuuguccuauga

SEQ ID NO: 1561 - RNA, 22 nt, Artificial Sequence
  Synthetic
guuuggugccaaaugcuugucc

SEQ ID NO: 1562 - RNA, 22 nt, Artificial Sequence
  Synthetic
uagaaaucauaggacaagcauu

SEQ ID NO: 1563 - RNA, 22 nt, Artificial Sequence
  Synthetic
uaggacaagcauuuggcaccaa

SEQ ID NO: 1564 - RNA, 22 nt, Artificial Sequence
  Synthetic
uauguuuggugccaaaugcuug

SEQ ID NO: 1565 - RNA, 22 nt, Artificial Sequence
  Synthetic
ucauagaaaucauaggacaagc

SEQ ID NO: 1566 - RNA, 22 nt, Artificial Sequence
  Synthetic
ucauaggacaagcauuuggcac

SEQ ID NO: 1567 - RNA, 22 nt, Artificial Sequence
  Synthetic
ugacccagcuauguuuggugcc

SEQ ID NO: 1568 - RNA, 22 nt, Artificial Sequence
  Synthetic
ugccaaaugcuuguccuaugau

SEQ ID NO: 1569 - RNA, 22 nt, Artificial Sequence
  Synthetic
uggugccaaaugcuuguccuau

SEQ ID NO: 1570 - RNA, 22 nt, Artificial Sequence
  Synthetic
uguuuggugccaaaugcuuguc

SEQ ID NO: 1571 - RNA, 22 nt, Artificial Sequence
  Synthetic
uuggugccaaaugcuuguccua

SEQ ID NO: 1572 - RNA, 22 nt, Artificial Sequence
  Synthetic
uuuggugccaaaugcuuguccu

SEQ ID NO: 1573 - RNA, 20 nt, Artificial Sequence
  Synthetic
aaacuggugucugacuugag

SEQ ID NO: 1574 - RNA, 20 nt, Artificial Sequence
  Synthetic
aacuggugucugacuugagg

SEQ ID NO: 1575 - RNA, 20 nt, Artificial Sequence
  Synthetic
aagcacccuguagccacucu

SEQ ID NO: 1576 - RNA, 20 nt, Artificial Sequence
  Synthetic
acagggugcuuccucaaguc

SEQ ID NO: 1577 - RNA, 20 nt, Artificial Sequence
  Synthetic
acuggugucugacuugagga

SEQ ID NO: 1578 - RNA, 20 nt, Artificial Sequence
  Synthetic
acuugaggaagcacccugua

SEQ ID NO: 1579 - RNA, 20 nt, Artificial Sequence
  Synthetic
agaguggcuacagggugcuu

SEQ ID NO: 1580 - RNA, 20 nt, Artificial Sequence
  Synthetic
agcacccuguagccacucug

SEQ ID NO: 1581 - RNA, 20 nt, Artificial Sequence
  Synthetic
aggaagcacccuguagccac

SEQ ID NO: 1582 - RNA, 20 nt, Artificial Sequence
  Synthetic
agggugcuuccucaagucag

SEQ ID NO: 1583 - RNA, 20 nt, Artificial Sequence
  Synthetic
aguggcuacagggugcuucc

SEQ ID NO: 1584 - RNA, 20 nt, Artificial Sequence
  Synthetic
aucagaguggcuacagggug

SEQ ID NO: 1585 - RNA, 20 nt, Artificial Sequence
  Synthetic
cagaguggcuacagggugcu

SEQ ID NO: 1586 - RNA, 20 nt, Artificial Sequence
  Synthetic
cagggugcuuccucaaguca

SEQ ID NO: 1587 - RNA, 20 nt, Artificial Sequence
  Synthetic
caucagaguggcuacagggu

SEQ ID NO: 1588 - RNA, 20 nt, Artificial Sequence
  Synthetic
ccaucagaguggcuacaggg

SEQ ID NO: 1589 - RNA, 20 nt, Artificial Sequence
  Synthetic
cuacagggugcuuccucaag

SEQ ID NO: 1590 - RNA, 20 nt, Artificial Sequence
  Synthetic
cugacuugaggaagcacccu

SEQ ID NO: 1591 - RNA, 20 nt, Artificial Sequence
  Synthetic
cuggugucugacuugaggaa

SEQ ID NO: 1592 - RNA, 20 nt, Artificial Sequence
  Synthetic
cuugaggaagcacccuguag

SEQ ID NO: 1593 - RNA, 20 nt, Artificial Sequence
  Synthetic
gaagcacccuguagccacuc

SEQ ID NO: 1594 - RNA, 20 nt, Artificial Sequence
  Synthetic
gacuugaggaagcacccugu

SEQ ID NO: 1595 - RNA, 20 nt, Artificial Sequence
  Synthetic
gaggaagcacccuguagcca

SEQ ID NO: 1596 - RNA, 20 nt, Artificial Sequence
  Synthetic
gaguggcuacagggugcuuc

SEQ ID NO: 1597 - RNA, 20 nt, Artificial Sequence
  Synthetic
gccaucagaguggcuacagg

SEQ ID NO: 1598 - RNA, 20 nt, Artificial Sequence
  Synthetic
gcuacagggugcuuccucaa

SEQ ID NO: 1599 - RNA, 20 nt, Artificial Sequence
  Synthetic
gcuuccucaagucagacacc

SEQ ID NO: 1600 - RNA, 20 nt, Artificial Sequence
  Synthetic
ggaagcacccuguagccacu

SEQ ID NO: 1601 - RNA, 20 nt, Artificial Sequence
  Synthetic
ggcuacagggugcuuccuca

SEQ ID NO: 1602 - RNA, 20 nt, Artificial Sequence
  Synthetic
gggugcuuccucaagucaga

SEQ ID NO: 1603 - RNA, 20 nt, Artificial Sequence
  Synthetic
ggugcuuccucaagucagac

SEQ ID NO: 1604 - RNA, 20 nt, Artificial Sequence
  Synthetic
ggugucugacuugaggaagc

SEQ ID NO: 1605 - RNA, 20 nt, Artificial Sequence
  Synthetic
gucugacuugaggaagcacc

SEQ ID NO: 1606 - RNA, 20 nt, Artificial Sequence
  Synthetic
gugcuuccucaagucagaca

SEQ ID NO: 1607 - RNA, 20 nt, Artificial Sequence
  Synthetic
guggcuacagggugcuuccu

SEQ ID NO: 1608 - RNA, 20 nt, Artificial Sequence
  Synthetic
gugucugacuugaggaagca

SEQ ID NO: 1609 - RNA, 20 nt, Artificial Sequence
  Synthetic
uacagggugcuuccucaagu

SEQ ID NO: 1610 - RNA, 20 nt, Artificial Sequence
  Synthetic
ucagaguggcuacagggugc

SEQ ID NO: 1611 - RNA, 20 nt, Artificial Sequence
  Synthetic
ucugacuugaggaagcaccc

SEQ ID NO: 1612 - RNA, 20 nt, Artificial Sequence
  Synthetic
ugacuugaggaagcacccug

SEQ ID NO: 1613 - RNA, 20 nt, Artificial Sequence
  Synthetic
ugaggaagcacccuguagcc

SEQ ID NO: 1614 - RNA, 20 nt, Artificial Sequence
  Synthetic
ugcuuccucaagucagacac

SEQ ID NO: 1615 - RNA, 20 nt, Artificial Sequence
  Synthetic
uggcuacagggugcuuccuc

SEQ ID NO: 1616 - RNA, 20 nt, Artificial Sequence
  Synthetic
uggugucugacuugaggaag

SEQ ID NO: 1617 - RNA, 20 nt, Artificial Sequence
  Synthetic
ugucugacuugaggaagcac

SEQ ID NO: 1618 - RNA, 20 nt, Artificial Sequence
  Synthetic
uugaggaagcacccuguagc

SEQ ID NO: 1619 - RNA, 21 nt, Artificial Sequence
  Synthetic
aaacuggugucugacuugagg

SEQ ID NO: 1620 - RNA, 21 nt, Artificial Sequence
  Synthetic
aacuggugucugacuugagga

SEQ ID NO: 1621 - RNA, 21 nt, Artificial Sequence
  Synthetic
aagcacccuguagccacucug

SEQ ID NO: 1622 - RNA, 21 nt, Artificial Sequence
  Synthetic
acagggugcuuccucaaguca

SEQ ID NO: 1623 - RNA, 21 nt, Artificial Sequence
  Synthetic
acuggugucugacuugaggaa

SEQ ID NO: 1624 - RNA, 21 nt, Artificial Sequence
  Synthetic
acuugaggaagcacccuguag

SEQ ID NO: 1625 - RNA, 21 nt, Artificial Sequence
  Synthetic
agaguggcuacagggugcuuc

SEQ ID NO: 1626 - RNA, 21 nt, Artificial Sequence
  Synthetic
agcacccuguagccacucuga

SEQ ID NO: 1627 - RNA, 21 nt, Artificial Sequence
  Synthetic
aggaagcacccuguagccacu

SEQ ID NO: 1628 - RNA, 21 nt, Artificial Sequence
  Synthetic
agggugcuuccucaagucaga

SEQ ID NO: 1629 - RNA, 21 nt, Artificial Sequence
  Synthetic
aguggcuacagggugcuuccu

SEQ ID NO: 1630 - RNA, 21 nt, Artificial Sequence
  Synthetic
aucagaguggcuacagggugc

SEQ ID NO: 1631 - RNA, 21 nt, Artificial Sequence
  Synthetic
cagaguggcuacagggugcuu

SEQ ID NO: 1632 - RNA, 21 nt, Artificial Sequence
  Synthetic
cagggugcuuccucaagucag

SEQ ID NO: 1633 - RNA, 21 nt, Artificial Sequence
  Synthetic
caucagaguggcuacagggug

SEQ ID NO: 1634 - RNA, 21 nt, Artificial Sequence
  Synthetic
ccaucagaguggcuacagggu

SEQ ID NO: 1635 - RNA, 21 nt, Artificial Sequence
  Synthetic
cuacagggugcuuccucaagu

SEQ ID NO: 1636 - RNA, 21 nt, Artificial Sequence
  Synthetic
cugacuugaggaagcacccug

SEQ ID NO: 1637 - RNA, 21 nt, Artificial Sequence
  Synthetic
cuggugucugacuugaggaag

SEQ ID NO: 1638 - RNA, 21 nt, Artificial Sequence
  Synthetic
cuugaggaagcacccuguagc

SEQ ID NO: 1639 - RNA, 21 nt, Artificial Sequence
  Synthetic
gaaacuggugucugacuugag

SEQ ID NO: 1640 - RNA, 21 nt, Artificial Sequence
  Synthetic
gaagcacccuguagccacucu

SEQ ID NO: 1641 - RNA, 21 nt, Artificial Sequence
  Synthetic
gacuugaggaagcacccugua

SEQ ID NO: 1642 - RNA, 21 nt, Artificial Sequence
  Synthetic
gaggaagcacccuguagccac

SEQ ID NO: 1643 - RNA, 21 nt, Artificial Sequence
  Synthetic
gaguggcuacagggugcuucc

SEQ ID NO: 1644 - RNA, 21 nt, Artificial Sequence
  Synthetic
gccaucagaguggcuacaggg

SEQ ID NO: 1645 - RNA, 21 nt, Artificial Sequence
  Synthetic
gcuacagggugcuuccucaag

SEQ ID NO: 1646 - RNA, 21 nt, Artificial Sequence
  Synthetic
gcuuccucaagucagacacca

SEQ ID NO: 1647 - RNA, 21 nt, Artificial Sequence
  Synthetic
ggaagcacccuguagccacuc

SEQ ID NO: 1648 - RNA, 21 nt, Artificial Sequence
  Synthetic
ggccaucagaguggcuacagg

SEQ ID NO: 1649 - RNA, 21 nt, Artificial Sequence
  Synthetic
ggcuacagggugcuuccucaa

SEQ ID NO: 1650 - RNA, 21 nt, Artificial Sequence
  Synthetic
gggugcuuccucaagucagac

SEQ ID NO: 1651 - RNA, 21 nt, Artificial Sequence
  Synthetic
ggugcuuccucaagucagaca

SEQ ID NO: 1652 - RNA, 21 nt, Artificial Sequence
  Synthetic
ggugucugacuugaggaagca

SEQ ID NO: 1653 - RNA, 21 nt, Artificial Sequence
  Synthetic
gucugacuugaggaagcaccc

SEQ ID NO: 1654 - RNA, 21 nt, Artificial Sequence
  Synthetic
gugcuuccucaagucagacac

SEQ ID NO: 1655 - RNA, 21 nt, Artificial Sequence
  Synthetic
guggcuacagggugcuuccuc

SEQ ID NO: 1656 - RNA, 21 nt, Artificial Sequence
  Synthetic
gugucugacuugaggaagcac

SEQ ID NO: 1657 - RNA, 21 nt, Artificial Sequence
  Synthetic
uacagggugcuuccucaaguc

SEQ ID NO: 1658 - RNA, 21 nt, Artificial Sequence
  Synthetic
ucagaguggcuacagggugcu

SEQ ID NO: 1659 - RNA, 21 nt, Artificial Sequence
  Synthetic
ucugacuugaggaagcacccu

SEQ ID NO: 1660 - RNA, 21 nt, Artificial Sequence
  Synthetic
ugacuugaggaagcacccugu

SEQ ID NO: 1661 - RNA, 21 nt, Artificial Sequence
  Synthetic
ugaggaagcacccuguagcca

SEQ ID NO: 1662 - RNA, 21 nt, Artificial Sequence
  Synthetic
ugcuuccucaagucagacacc

SEQ ID NO: 1663 - RNA, 21 nt, Artificial Sequence
  Synthetic
uggcuacagggugcuuccuca

SEQ ID NO: 1664 - RNA, 21 nt, Artificial Sequence
  Synthetic
uggugucugacuugaggaagc

SEQ ID NO: 1665 - RNA, 21 nt, Artificial Sequence
  Synthetic
ugucugacuugaggaagcacc

SEQ ID NO: 1666 - RNA, 21 nt, Artificial Sequence
  Synthetic
uugaggaagcacccuguagcc

SEQ ID NO: 1667 - RNA, 22 nt, Artificial Sequence
  Synthetic
aaacuggugucugacuugagga

SEQ ID NO: 1668 - RNA, 22 nt, Artificial Sequence
  Synthetic
aacuggugucugacuugaggaa

SEQ ID NO: 1669 - RNA, 22 nt, Artificial Sequence
  Synthetic
aagcacccuguagccacucuga

SEQ ID NO: 1670 - RNA, 22 nt, Artificial Sequence
  Synthetic
acagggugcuuccucaagucag

SEQ ID NO: 1671 - RNA, 22 nt, Artificial Sequence
  Synthetic
acuggugucugacuugaggaag

SEQ ID NO: 1672 - RNA, 22 nt, Artificial Sequence
  Synthetic
acuugaggaagcacccuguagc

SEQ ID NO: 1673 - RNA, 22 nt, Artificial Sequence
  Synthetic
agaguggcuacagggugcuucc

SEQ ID NO: 1674 - RNA, 22 nt, Artificial Sequence
  Synthetic
agcacccuguagccacucugau

SEQ ID NO: 1675 - RNA, 22 nt, Artificial Sequence
  Synthetic
aggaagcacccuguagccacuc

SEQ ID NO: 1676 - RNA, 22 nt, Artificial Sequence
  Synthetic
agggugcuuccucaagucagac

SEQ ID NO: 1677 - RNA, 22 nt, Artificial Sequence
  Synthetic
aguggcuacagggugcuuccuc

SEQ ID NO: 1678 - RNA, 22 nt, Artificial Sequence
  Synthetic
aucagaguggcuacagggugcu

SEQ ID NO: 1679 - RNA, 22 nt, Artificial Sequence
  Synthetic
cagaguggcuacagggugcuuc

SEQ ID NO: 1680 - RNA, 22 nt, Artificial Sequence
  Synthetic
cagggugcuuccucaagucaga

SEQ ID NO: 1681 - RNA, 22 nt, Artificial Sequence
  Synthetic
caucagaguggcuacagggugc

SEQ ID NO: 1682 - RNA, 22 nt, Artificial Sequence
  Synthetic
ccaucagaguggcuacagggug

SEQ ID NO: 1683 - RNA, 22 nt, Artificial Sequence
  Synthetic
cuacagggugcuuccucaaguc

SEQ ID NO: 1684 - RNA, 22 nt, Artificial Sequence
  Synthetic
cugacuugaggaagcacccugu

SEQ ID NO: 1685 - RNA, 22 nt, Artificial Sequence
  Synthetic
cuggugucugacuugaggaagc

SEQ ID NO: 1686 - RNA, 22 nt, Artificial Sequence
  Synthetic
cuugaggaagcacccuguagcc

SEQ ID NO: 1687 - RNA, 22 nt, Artificial Sequence
  Synthetic
gaaacuggugucugacuugagg

SEQ ID NO: 1688 - RNA, 22 nt, Artificial Sequence
  Synthetic
gaagcacccuguagccacucug

SEQ ID NO: 1689 - RNA, 22 nt, Artificial Sequence
  Synthetic
gacuugaggaagcacccuguag

SEQ ID NO: 1690 - RNA, 22 nt, Artificial Sequence
  Synthetic
gaggaagcacccuguagccacu

SEQ ID NO: 1691 - RNA, 22 nt, Artificial Sequence
  Synthetic
gaguggcuacagggugcuuccu

SEQ ID NO: 1692 - RNA, 22 nt, Artificial Sequence
  Synthetic
gccaucagaguggcuacagggu

SEQ ID NO: 1693 - RNA, 22 nt, Artificial Sequence
  Synthetic
gcuacagggugcuuccucaagu

SEQ ID NO: 1694 - RNA, 22 nt, Artificial Sequence
  Synthetic
gcuuccucaagucagacaccag

SEQ ID NO: 1695 - RNA, 22 nt, Artificial Sequence
  Synthetic
ggaagcacccuguagccacucu

SEQ ID NO: 1696 - RNA, 22 nt, Artificial Sequence
  Synthetic
ggccaucagaguggcuacaggg

SEQ ID NO: 1697 - RNA, 22 nt, Artificial Sequence
  Synthetic
ggcuacagggugcuuccucaag

SEQ ID NO: 1698 - RNA, 22 nt, Artificial Sequence
  Synthetic
gggugcuuccucaagucagaca

SEQ ID NO: 1699 - RNA, 22 nt, Artificial Sequence
  Synthetic
ggugcuuccucaagucagacac

SEQ ID NO: 1700 - RNA, 22 nt, Artificial Sequence
  Synthetic
ggugucugacuugaggaagcac

SEQ ID NO: 1701 - RNA, 22 nt, Artificial Sequence
  Synthetic
gucugacuugaggaagcacccu

SEQ ID NO: 1702 - RNA, 22 nt, Artificial Sequence
  Synthetic
gugcuuccucaagucagacacc

SEQ ID NO: 1703 - RNA, 22 nt, Artificial Sequence
  Synthetic
guggcuacagggugcuuccuca

SEQ ID NO: 1704 - RNA, 22 nt, Artificial Sequence
  Synthetic
gugucugacuugaggaagcacc

SEQ ID NO: 1705 - RNA, 22 nt, Artificial Sequence
  Synthetic
uacagggugcuuccucaaguca

SEQ ID NO: 1706 - RNA, 22 nt, Artificial Sequence
  Synthetic
ucagaguggcuacagggugcuu

SEQ ID NO: 1707 - RNA, 22 nt, Artificial Sequence
  Synthetic
ucugacuugaggaagcacccug

SEQ ID NO: 1708 - RNA, 22 nt, Artificial Sequence
  Synthetic
ugaaacuggugucugacuugag

SEQ ID NO: 1709 - RNA, 22 nt, Artificial Sequence
  Synthetic
ugacuugaggaagcacccugua

SEQ ID NO: 1710 - RNA, 22 nt, Artificial Sequence
  Synthetic
ugaggaagcacccuguagccac

SEQ ID NO: 1711 - RNA, 22 nt, Artificial Sequence
  Synthetic
ugcuuccucaagucagacacca

SEQ ID NO: 1712 - RNA, 22 nt, Artificial Sequence
  Synthetic
uggccaucagaguggcuacagg

SEQ ID NO: 1713 - RNA, 22 nt, Artificial Sequence
  Synthetic
uggcuacagggugcuuccucaa

SEQ ID NO: 1714 - RNA, 22 nt, Artificial Sequence
  Synthetic
uggugucugacuugaggaagca

SEQ ID NO: 1715 - RNA, 22 nt, Artificial Sequence
  Synthetic
ugucugacuugaggaagcaccc

SEQ ID NO: 1716 - RNA, 22 nt, Artificial Sequence
  Synthetic
uugaggaagcacccuguagcca

SEQ ID NO: 1717 - RNA, 20 nt, Artificial Sequence
  Synthetic
aaaggacauccccauagaag

SEQ ID NO: 1718 - RNA, 20 nt, Artificial Sequence
  Synthetic
aaggacauccccauagaagu

SEQ ID NO: 1719 - RNA, 20 nt, Artificial Sequence
  Synthetic
aagucuaucccaucucuaac

SEQ ID NO: 1720 - RNA, 20 nt, Artificial Sequence
  Synthetic
acauaccugguuagagaugg

SEQ ID NO: 1721 - RNA, 20 nt, Artificial Sequence
  Synthetic
acauccccauagaagucuau

SEQ ID NO: 1722 - RNA, 20 nt, Artificial Sequence
  Synthetic
accugguuagagaugggaua

SEQ ID NO: 1723 - RNA, 20 nt, Artificial Sequence
  Synthetic
agaagucuaucccaucucua

SEQ ID NO: 1724 - RNA, 20 nt, Artificial Sequence
  Synthetic
agagaugggauagacuucua

SEQ ID NO: 1725 - RNA, 20 nt, Artificial Sequence
  Synthetic
agaugggauagacuucuaug

SEQ ID NO: 1726 - RNA, 20 nt, Artificial Sequence
  Synthetic
aggacauccccauagaaguc

SEQ ID NO: 1727 - RNA, 20 nt, Artificial Sequence
  Synthetic
agucuaucccaucucuaacc

SEQ ID NO: 1728 - RNA, 20 nt, Artificial Sequence
  Synthetic
auaccugguuagagauggga

SEQ ID NO: 1729 - RNA, 20 nt, Artificial Sequence
  Synthetic
auagaagucuaucccaucuc

SEQ ID NO: 1730 - RNA, 20 nt, Artificial Sequence
  Synthetic
auagacuucuauggggaugu

SEQ ID NO: 1731 - RNA, 20 nt, Artificial Sequence
  Synthetic
auccccauagaagucuaucc

SEQ ID NO: 1732 - RNA, 20 nt, Artificial Sequence
  Synthetic
augggauagacuucuauggg

SEQ ID NO: 1733 - RNA, 20 nt, Artificial Sequence
  Synthetic
cacauaccugguuagagaug

SEQ ID NO: 1734 - RNA, 20 nt, Artificial Sequence
  Synthetic
cauaccugguuagagauggg

SEQ ID NO: 1735 - RNA, 20 nt, Artificial Sequence
  Synthetic
cauagaagucuaucccaucu

SEQ ID NO: 1736 - RNA, 20 nt, Artificial Sequence
  Synthetic
cauccccauagaagucuauc

SEQ ID NO: 1737 - RNA, 20 nt, Artificial Sequence
  Synthetic
ccauagaagucuaucccauc

SEQ ID NO: 1738 - RNA, 20 nt, Artificial Sequence
  Synthetic
cccauagaagucuaucccau

SEQ ID NO: 1739 - RNA, 20 nt, Artificial Sequence
  Synthetic
ccccauagaagucuauccca

SEQ ID NO: 1740 - RNA, 20 nt, Artificial Sequence
  Synthetic
ccugguuagagaugggauag

SEQ ID NO: 1741 - RNA, 20 nt, Artificial Sequence
  Synthetic
cuaucccaucucuaaccagg

SEQ ID NO: 1742 - RNA, 20 nt, Artificial Sequence
  Synthetic
cugguuagagaugggauaga

SEQ ID NO: 1743 - RNA, 20 nt, Artificial Sequence
  Synthetic
gaagucuaucccaucucuaa

SEQ ID NO: 1744 - RNA, 20 nt, Artificial Sequence
  Synthetic
gacauccccauagaagucua

SEQ ID NO: 1745 - RNA, 20 nt, Artificial Sequence
  Synthetic
gagaugggauagacuucuau

SEQ ID NO: 1746 - RNA, 20 nt, Artificial Sequence
  Synthetic
gauagacuucuauggggaug

SEQ ID NO: 1747 - RNA, 20 nt, Artificial Sequence
  Synthetic
gaugggauagacuucuaugg

SEQ ID NO: 1748 - RNA, 20 nt, Artificial Sequence
  Synthetic
ggacauccccauagaagucu

SEQ ID NO: 1749 - RNA, 20 nt, Artificial Sequence
  Synthetic
ggauagacuucuauggggau

SEQ ID NO: 1750 - RNA, 20 nt, Artificial Sequence
  Synthetic
gggauagacuucuaugggga

SEQ ID NO: 1751 - RNA, 20 nt, Artificial Sequence
  Synthetic
gguuagagaugggauagacu

SEQ ID NO: 1752 - RNA, 20 nt, Artificial Sequence
  Synthetic
gucuaucccaucucuaacca

SEQ ID NO: 1753 - RNA, 20 nt, Artificial Sequence
  Synthetic
guuagagaugggauagacuu

SEQ ID NO: 1754 - RNA, 20 nt, Artificial Sequence
  Synthetic
uaccugguuagagaugggau

SEQ ID NO: 1755 - RNA, 20 nt, Artificial Sequence
  Synthetic
uagaagucuaucccaucucu

SEQ ID NO: 1756 - RNA, 20 nt, Artificial Sequence
  Synthetic
uagagaugggauagacuucu

SEQ ID NO: 1757 - RNA, 20 nt, Artificial Sequence
  Synthetic
uaucccaucucuaaccaggu

SEQ ID NO: 1758 - RNA, 20 nt, Artificial Sequence
  Synthetic
uccccauagaagucuauccc

SEQ ID NO: 1759 - RNA, 20 nt, Artificial Sequence
  Synthetic
ucuaucccaucucuaaccag

SEQ ID NO: 1760 - RNA, 20 nt, Artificial Sequence
  Synthetic
ugggauagacuucuaugggg

SEQ ID NO: 1761 - RNA, 20 nt, Artificial Sequence
  Synthetic
ugguuagagaugggauagac

SEQ ID NO: 1762 - RNA, 20 nt, Artificial Sequence
  Synthetic
uuagagaugggauagacuuc

SEQ ID NO: 1763 - RNA, 21 nt, Artificial Sequence
  Synthetic
aaaaggacauccccauagaag

SEQ ID NO: 1764 - RNA, 21 nt, Artificial Sequence
  Synthetic
aaaggacauccccauagaagu

SEQ ID NO: 1765 - RNA, 21 nt, Artificial Sequence
  Synthetic
aaggacauccccauagaaguc

SEQ ID NO: 1766 - RNA, 21 nt, Artificial Sequence
  Synthetic
aagucuaucccaucucuaacc

SEQ ID NO: 1767 - RNA, 21 nt, Artificial Sequence
  Synthetic
acacauaccugguuagagaug

SEQ ID NO: 1768 - RNA, 21 nt, Artificial Sequence
  Synthetic
acauaccugguuagagauggg

SEQ ID NO: 1769 - RNA, 21 nt, Artificial Sequence
  Synthetic
acauccccauagaagucuauc

SEQ ID NO: 1770 - RNA, 21 nt, Artificial Sequence
  Synthetic
accugguuagagaugggauag

SEQ ID NO: 1771 - RNA, 21 nt, Artificial Sequence
  Synthetic
agaagucuaucccaucucuaa

SEQ ID NO: 1772 - RNA, 21 nt, Artificial Sequence
  Synthetic
agagaugggauagacuucuau

SEQ ID NO: 1773 - RNA, 21 nt, Artificial Sequence
  Synthetic
agaugggauagacuucuaugg

SEQ ID NO: 1774 - RNA, 21 nt, Artificial Sequence
  Synthetic
aggacauccccauagaagucu

SEQ ID NO: 1775 - RNA, 21 nt, Artificial Sequence
  Synthetic
agucuaucccaucucuaacca

SEQ ID NO: 1776 - RNA, 21 nt, Artificial Sequence
  Synthetic
auaccugguuagagaugggau

SEQ ID NO: 1777 - RNA, 21 nt, Artificial Sequence
  Synthetic
auagaagucuaucccaucucu

SEQ ID NO: 1778 - RNA, 21 nt, Artificial Sequence
  Synthetic
auagacuucuauggggauguc

SEQ ID NO: 1779 - RNA, 21 nt, Artificial Sequence
  Synthetic
auccccauagaagucuauccc

SEQ ID NO: 1780 - RNA, 21 nt, Artificial Sequence
  Synthetic
augggauagacuucuaugggg

SEQ ID NO: 1781 - RNA, 21 nt, Artificial Sequence
  Synthetic
cacauaccugguuagagaugg

SEQ ID NO: 1782 - RNA, 21 nt, Artificial Sequence
  Synthetic
cauaccugguuagagauggga

SEQ ID NO: 1783 - RNA, 21 nt, Artificial Sequence
  Synthetic
cauagaagucuaucccaucuc

SEQ ID NO: 1784 - RNA, 21 nt, Artificial Sequence
  Synthetic
cauccccauagaagucuaucc

SEQ ID NO: 1785 - RNA, 21 nt, Artificial Sequence
  Synthetic
ccauagaagucuaucccaucu

SEQ ID NO: 1786 - RNA, 21 nt, Artificial Sequence
  Synthetic
cccauagaagucuaucccauc

SEQ ID NO: 1787 - RNA, 21 nt, Artificial Sequence
  Synthetic
ccccauagaagucuaucccau

SEQ ID NO: 1788 - RNA, 21 nt, Artificial Sequence
  Synthetic
ccugguuagagaugggauaga

SEQ ID NO: 1789 - RNA, 21 nt, Artificial Sequence
  Synthetic
cuaucccaucucuaaccaggu

SEQ ID NO: 1790 - RNA, 21 nt, Artificial Sequence
  Synthetic
cugguuagagaugggauagac

SEQ ID NO: 1791 - RNA, 21 nt, Artificial Sequence
  Synthetic
gaagucuaucccaucucuaac

SEQ ID NO: 1792 - RNA, 21 nt, Artificial Sequence
  Synthetic
gacauccccauagaagucuau

SEQ ID NO: 1793 - RNA, 21 nt, Artificial Sequence
  Synthetic
gagaugggauagacuucuaug

SEQ ID NO: 1794 - RNA, 21 nt, Artificial Sequence
  Synthetic
gauagacuucuauggggaugu

SEQ ID NO: 1795 - RNA, 21 nt, Artificial Sequence
  Synthetic
gaugggauagacuucuauggg

SEQ ID NO: 1796 - RNA, 21 nt, Artificial Sequence
  Synthetic
ggacauccccauagaagucua

SEQ ID NO: 1797 - RNA, 21 nt, Artificial Sequence
  Synthetic
ggauagacuucuauggggaug

SEQ ID NO: 1798 - RNA, 21 nt, Artificial Sequence
  Synthetic
gggauagacuucuauggggau

SEQ ID NO: 1799 - RNA, 21 nt, Artificial Sequence
  Synthetic
gguuagagaugggauagacuu

SEQ ID NO: 1800 - RNA, 21 nt, Artificial Sequence
  Synthetic
gucuaucccaucucuaaccag

SEQ ID NO: 1801 - RNA, 21 nt, Artificial Sequence
  Synthetic
guuagagaugggauagacuuc

SEQ ID NO: 1802 - RNA, 21 nt, Artificial Sequence
  Synthetic
uaccugguuagagaugggaua

SEQ ID NO: 1803 - RNA, 21 nt, Artificial Sequence
  Synthetic
uagaagucuaucccaucucua

SEQ ID NO: 1804 - RNA, 21 nt, Artificial Sequence
  Synthetic
uagagaugggauagacuucua

SEQ ID NO: 1805 - RNA, 21 nt, Artificial Sequence
  Synthetic
uaucccaucucuaaccaggua

SEQ ID NO: 1806 - RNA, 21 nt, Artificial Sequence
  Synthetic
uccccauagaagucuauccca

SEQ ID NO: 1807 - RNA, 21 nt, Artificial Sequence
  Synthetic
ucuaucccaucucuaaccagg

SEQ ID NO: 1808 - RNA, 21 nt, Artificial Sequence
  Synthetic
ugggauagacuucuaugggga

SEQ ID NO: 1809 - RNA, 21 nt, Artificial Sequence
  Synthetic
ugguuagagaugggauagacu

SEQ ID NO: 1810 - RNA, 21 nt, Artificial Sequence
  Synthetic
uuagagaugggauagacuucu

SEQ ID NO: 1811 - RNA, 22 nt, Artificial Sequence
  Synthetic
aaaaaggacauccccauagaag

SEQ ID NO: 1812 - RNA, 22 nt, Artificial Sequence
  Synthetic
aaaaggacauccccauagaagu

SEQ ID NO: 1813 - RNA, 22 nt, Artificial Sequence
  Synthetic
aaaggacauccccauagaaguc

SEQ ID NO: 1814 - RNA, 22 nt, Artificial Sequence
  Synthetic
aaggacauccccauagaagucu

SEQ ID NO: 1815 - RNA, 22 nt, Artificial Sequence
  Synthetic
aagucuaucccaucucuaacca

SEQ ID NO: 1816 - RNA, 22 nt, Artificial Sequence
  Synthetic
acacauaccugguuagagaugg

SEQ ID NO: 1817 - RNA, 22 nt, Artificial Sequence
  Synthetic
acauaccugguuagagauggga

SEQ ID NO: 1818 - RNA, 22 nt, Artificial Sequence
  Synthetic
acauccccauagaagucuaucc

SEQ ID NO: 1819 - RNA, 22 nt, Artificial Sequence
  Synthetic
accugguuagagaugggauaga

SEQ ID NO: 1820 - RNA, 22 nt, Artificial Sequence
  Synthetic
agaagucuaucccaucucuaac

SEQ ID NO: 1821 - RNA, 22 nt, Artificial Sequence
  Synthetic
agagaugggauagacuucuaug

SEQ ID NO: 1822 - RNA, 22 nt, Artificial Sequence
  Synthetic
agaugggauagacuucuauggg

SEQ ID NO: 1823 - RNA, 22 nt, Artificial Sequence
  Synthetic
aggacauccccauagaagucua

SEQ ID NO: 1824 - RNA, 22 nt, Artificial Sequence
  Synthetic
agucuaucccaucucuaaccag

SEQ ID NO: 1825 - RNA, 22 nt, Artificial Sequence
  Synthetic
auaccugguuagagaugggaua

SEQ ID NO: 1826 - RNA, 22 nt, Artificial Sequence
  Synthetic
auagaagucuaucccaucucua

SEQ ID NO: 1827 - RNA, 22 nt, Artificial Sequence
  Synthetic
auagacuucuauggggaugucc

SEQ ID NO: 1828 - RNA, 22 nt, Artificial Sequence
  Synthetic
auccccauagaagucuauccca

SEQ ID NO: 1829 - RNA, 22 nt, Artificial Sequence
  Synthetic
augggauagacuucuaugggga

SEQ ID NO: 1830 - RNA, 22 nt, Artificial Sequence
  Synthetic
cacacauaccugguuagagaug

SEQ ID NO: 1831 - RNA, 22 nt, Artificial Sequence
  Synthetic
cacauaccugguuagagauggg

SEQ ID NO: 1832 - RNA, 22 nt, Artificial Sequence
  Synthetic
cauaccugguuagagaugggau

SEQ ID NO: 1833 - RNA, 22 nt, Artificial Sequence
  Synthetic
cauagaagucuaucccaucucu

SEQ ID NO: 1834 - RNA, 22 nt, Artificial Sequence
  Synthetic
cauccccauagaagucuauccc

SEQ ID NO: 1835 - RNA, 22 nt, Artificial Sequence
  Synthetic
ccauagaagucuaucccaucuc

SEQ ID NO: 1836 - RNA, 22 nt, Artificial Sequence
  Synthetic
cccauagaagucuaucccaucu

SEQ ID NO: 1837 - RNA, 22 nt, Artificial Sequence
  Synthetic
ccccauagaagucuaucccauc

SEQ ID NO: 1838 - RNA, 22 nt, Artificial Sequence
  Synthetic
ccugguuagagaugggauagac

SEQ ID NO: 1839 - RNA, 22 nt, Artificial Sequence
  Synthetic
cuaucccaucucuaaccaggua

SEQ ID NO: 1840 - RNA, 22 nt, Artificial Sequence
  Synthetic
cugguuagagaugggauagacu

SEQ ID NO: 1841 - RNA, 22 nt, Artificial Sequence
  Synthetic
gaagucuaucccaucucuaacc

SEQ ID NO: 1842 - RNA, 22 nt, Artificial Sequence
  Synthetic
gacauccccauagaagucuauc

SEQ ID NO: 1843 - RNA, 22 nt, Artificial Sequence
  Synthetic
gagaugggauagacuucuaugg

SEQ ID NO: 1844 - RNA, 22 nt, Artificial Sequence
  Synthetic
gauagacuucuauggggauguc

SEQ ID NO: 1845 - RNA, 22 nt, Artificial Sequence
  Synthetic
gaugggauagacuucuaugggg

SEQ ID NO: 1846 - RNA, 22 nt, Artificial Sequence
  Synthetic
ggacauccccauagaagucuau

SEQ ID NO: 1847 - RNA, 22 nt, Artificial Sequence
  Synthetic
ggauagacuucuauggggaugu

SEQ ID NO: 1848 - RNA, 22 nt, Artificial Sequence
  Synthetic
gggauagacuucuauggggaug

SEQ ID NO: 1849 - RNA, 22 nt, Artificial Sequence
  Synthetic
gguuagagaugggauagacuuc

SEQ ID NO: 1850 - RNA, 22 nt, Artificial Sequence
  Synthetic
gucuaucccaucucuaaccagg

SEQ ID NO: 1851 - RNA, 22 nt, Artificial Sequence
  Synthetic
guuagagaugggauagacuucu

SEQ ID NO: 1852 - RNA, 22 nt, Artificial Sequence
  Synthetic
uaccugguuagagaugggauag

SEQ ID NO: 1853 - RNA, 22 nt, Artificial Sequence
  Synthetic
uagaagucuaucccaucucuaa

SEQ ID NO: 1854 - RNA, 22 nt, Artificial Sequence
  Synthetic
uagagaugggauagacuucuau

SEQ ID NO: 1855 - RNA, 22 nt, Artificial Sequence
  Synthetic
uaucccaucucuaaccagguau

SEQ ID NO: 1856 - RNA, 22 nt, Artificial Sequence
  Synthetic
uccccauagaagucuaucccau

SEQ ID NO: 1857 - RNA, 22 nt, Artificial Sequence
  Synthetic
ucuaucccaucucuaaccaggu

SEQ ID NO: 1858 - RNA, 22 nt, Artificial Sequence
  Synthetic
ugggauagacuucuauggggau

SEQ ID NO: 1859 - RNA, 22 nt, Artificial Sequence
  Synthetic
ugguuagagaugggauagacuu

SEQ ID NO: 1860 - RNA, 22 nt, Artificial Sequence
  Synthetic
uuagagaugggauagacuucua

SEQ ID NO: 1861 - RNA, 20 nt, Artificial Sequence
  Synthetic
aaacgccccgcagucaggac

SEQ ID NO: 1862 - RNA, 20 nt, Artificial Sequence
  Synthetic
aacgccccgcagucaggacu

SEQ ID NO: 1863 - RNA, 20 nt, Artificial Sequence
  Synthetic
aaguccugacugcggggcgu

SEQ ID NO: 1864 - RNA, 20 nt, Artificial Sequence
  Synthetic
acgccccgcagucaggacuu

SEQ ID NO: 1865 - RNA, 20 nt, Artificial Sequence
  Synthetic
acugcggggcguuugcucaa

SEQ ID NO: 1866 - RNA, 20 nt, Artificial Sequence
  Synthetic
agcaaacgccccgcagucag

SEQ ID NO: 1867 - RNA, 20 nt, Artificial Sequence
  Synthetic
aggaguaaguccugacugcg

SEQ ID NO: 1868 - RNA, 20 nt, Artificial Sequence
  Synthetic
aguaaguccugacugcgggg

SEQ ID NO: 1869 - RNA, 20 nt, Artificial Sequence
  Synthetic
aguccugacugcggggcguu

SEQ ID NO: 1870 - RNA, 20 nt, Artificial Sequence
  Synthetic
auggauuugcuuugagcaaa

SEQ ID NO: 1871 - RNA, 20 nt, Artificial Sequence
  Synthetic
auuugcuuugagcaaacgcc

SEQ ID NO: 1872 - RNA, 20 nt, Artificial Sequence
  Synthetic
caaacgccccgcagucagga

SEQ ID NO: 1873 - RNA, 20 nt, Artificial Sequence
  Synthetic
cauggauuugcuuugagcaa

SEQ ID NO: 1874 - RNA, 20 nt, Artificial Sequence
  Synthetic
ccauggauuugcuuugagca

SEQ ID NO: 1875 - RNA, 20 nt, Artificial Sequence
  Synthetic
ccugacugcggggcguuugc

SEQ ID NO: 1876 - RNA, 20 nt, Artificial Sequence
  Synthetic
cgccccgcagucaggacuua

SEQ ID NO: 1877 - RNA, 20 nt, Artificial Sequence
  Synthetic
cggggcguuugcucaaagca

SEQ ID NO: 1878 - RNA, 20 nt, Artificial Sequence
  Synthetic
cugacugcggggcguuugcu

SEQ ID NO: 1879 - RNA, 20 nt, Artificial Sequence
  Synthetic
cugcggggcguuugcucaaa

SEQ ID NO: 1880 - RNA, 20 nt, Artificial Sequence
  Synthetic
cuuugagcaaacgccccgca

SEQ ID NO: 1881 - RNA, 20 nt, Artificial Sequence
  Synthetic
gacugcggggcguuugcuca

SEQ ID NO: 1882 - RNA, 20 nt, Artificial Sequence
  Synthetic
gagcaaacgccccgcaguca

SEQ ID NO: 1883 - RNA, 20 nt, Artificial Sequence
  Synthetic
gaguaaguccugacugcggg

SEQ ID NO: 1884 - RNA, 20 nt, Artificial Sequence
  Synthetic
gauuugcuuugagcaaacgc

SEQ ID NO: 1885 - RNA, 20 nt, Artificial Sequence
  Synthetic
gcaaacgccccgcagucagg

SEQ ID NO: 1886 - RNA, 20 nt, Artificial Sequence
  Synthetic
gcggggcguuugcucaaagc

SEQ ID NO: 1887 - RNA, 20 nt, Artificial Sequence
  Synthetic
gcguuugcucaaagcaaauc

SEQ ID NO: 1888 - RNA, 20 nt, Artificial Sequence
  Synthetic
gcuuugagcaaacgccccgc

SEQ ID NO: 1889 - RNA, 20 nt, Artificial Sequence
  Synthetic
ggaguaaguccugacugcgg

SEQ ID NO: 1890 - RNA, 20 nt, Artificial Sequence
  Synthetic
ggauuugcuuugagcaaacg

SEQ ID NO: 1891 - RNA, 20 nt, Artificial Sequence
  Synthetic
ggcguuugcucaaagcaaau

SEQ ID NO: 1892 - RNA, 20 nt, Artificial Sequence
  Synthetic
gggcguuugcucaaagcaaa

SEQ ID NO: 1893 - RNA, 20 nt, Artificial Sequence
  Synthetic
ggggcguuugcucaaagcaa

SEQ ID NO: 1894 - RNA, 20 nt, Artificial Sequence
  Synthetic
guaaguccugacugcggggc

SEQ ID NO: 1895 - RNA, 20 nt, Artificial Sequence
  Synthetic
guccugacugcggggcguuu

SEQ ID NO: 1896 - RNA, 20 nt, Artificial Sequence
  Synthetic
uaaguccugacugcggggcg

SEQ ID NO: 1897 - RNA, 20 nt, Artificial Sequence
  Synthetic
uccugacugcggggcguuug

SEQ ID NO: 1898 - RNA, 20 nt, Artificial Sequence
  Synthetic
ugacugcggggcguuugcuc

SEQ ID NO: 1899 - RNA, 20 nt, Artificial Sequence
  Synthetic
ugagcaaacgccccgcaguc

SEQ ID NO: 1900 - RNA, 20 nt, Artificial Sequence
  Synthetic
ugcggggcguuugcucaaag

SEQ ID NO: 1901 - RNA, 20 nt, Artificial Sequence
  Synthetic
ugcuuugagcaaacgccccg

SEQ ID NO: 1902 - RNA, 20 nt, Artificial Sequence
  Synthetic
uggauuugcuuugagcaaac

SEQ ID NO: 1903 - RNA, 20 nt, Artificial Sequence
  Synthetic
uugagcaaacgccccgcagu

SEQ ID NO: 1904 - RNA, 20 nt, Artificial Sequence
  Synthetic
uugcuuugagcaaacgcccc

SEQ ID NO: 1905 - RNA, 20 nt, Artificial Sequence
  Synthetic
uuugagcaaacgccccgcag

SEQ ID NO: 1906 - RNA, 20 nt, Artificial Sequence
  Synthetic
uuugcuuugagcaaacgccc

SEQ ID NO: 1907 - RNA, 21 nt, Artificial Sequence
  Synthetic
aaacgccccgcagucaggacu

SEQ ID NO: 1908 - RNA, 21 nt, Artificial Sequence
  Synthetic
aacgccccgcagucaggacuu

SEQ ID NO: 1909 - RNA, 21 nt, Artificial Sequence
  Synthetic
aaguccugacugcggggcguu

SEQ ID NO: 1910 - RNA, 21 nt, Artificial Sequence
  Synthetic
acgccccgcagucaggacuua

SEQ ID NO: 1911 - RNA, 21 nt, Artificial Sequence
  Synthetic
acugcggggcguuugcucaaa

SEQ ID NO: 1912 - RNA, 21 nt, Artificial Sequence
  Synthetic
agcaaacgccccgcagucagg

SEQ ID NO: 1913 - RNA, 21 nt, Artificial Sequence
  Synthetic
aggaguaaguccugacugcgg

SEQ ID NO: 1914 - RNA, 21 nt, Artificial Sequence
  Synthetic
aguaaguccugacugcggggc

SEQ ID NO: 1915 - RNA, 21 nt, Artificial Sequence
  Synthetic
aguccugacugcggggcguuu

SEQ ID NO: 1916 - RNA, 21 nt, Artificial Sequence
  Synthetic
auggauuugcuuugagcaaac

SEQ ID NO: 1917 - RNA, 21 nt, Artificial Sequence
  Synthetic
auuugcuuugagcaaacgccc

SEQ ID NO: 1918 - RNA, 21 nt, Artificial Sequence
  Synthetic
caaacgccccgcagucaggac

SEQ ID NO: 1919 - RNA, 21 nt, Artificial Sequence
  Synthetic
caggaguaaguccugacugcg

SEQ ID NO: 1920 - RNA, 21 nt, Artificial Sequence
  Synthetic
cauggauuugcuuugagcaaa

SEQ ID NO: 1921 - RNA, 21 nt, Artificial Sequence
  Synthetic
ccauggauuugcuuugagcaa

SEQ ID NO: 1922 - RNA, 21 nt, Artificial Sequence
  Synthetic
ccugacugcggggcguuugcu

SEQ ID NO: 1923 - RNA, 21 nt, Artificial Sequence
  Synthetic
cgccccgcagucaggacuuac

SEQ ID NO: 1924 - RNA, 21 nt, Artificial Sequence
  Synthetic
cggggcguuugcucaaagcaa

SEQ ID NO: 1925 - RNA, 21 nt, Artificial Sequence
  Synthetic
cugacugcggggcguuugcuc

SEQ ID NO: 1926 - RNA, 21 nt, Artificial Sequence
  Synthetic
cugcggggcguuugcucaaag

SEQ ID NO: 1927 - RNA, 21 nt, Artificial Sequence
  Synthetic
cuuugagcaaacgccccgcag

SEQ ID NO: 1928 - RNA, 21 nt, Artificial Sequence
  Synthetic
gacugcggggcguuugcucaa

SEQ ID NO: 1929 - RNA, 21 nt, Artificial Sequence
  Synthetic
gagcaaacgccccgcagucag

SEQ ID NO: 1930 - RNA, 21 nt, Artificial Sequence
  Synthetic
gaguaaguccugacugcgggg

SEQ ID NO: 1931 - RNA, 21 nt, Artificial Sequence
  Synthetic
gauuugcuuugagcaaacgcc

SEQ ID NO: 1932 - RNA, 21 nt, Artificial Sequence
  Synthetic
gcaaacgccccgcagucagga

SEQ ID NO: 1933 - RNA, 21 nt, Artificial Sequence
  Synthetic
gccauggauuugcuuugagca

SEQ ID NO: 1934 - RNA, 21 nt, Artificial Sequence
  Synthetic
gcggggcguuugcucaaagca

SEQ ID NO: 1935 - RNA, 21 nt, Artificial Sequence
  Synthetic
gcguuugcucaaagcaaaucc

SEQ ID NO: 1936 - RNA, 21 nt, Artificial Sequence
  Synthetic
gcuuugagcaaacgccccgca

SEQ ID NO: 1937 - RNA, 21 nt, Artificial Sequence
  Synthetic
ggaguaaguccugacugcggg

SEQ ID NO: 1938 - RNA, 21 nt, Artificial Sequence
  Synthetic
ggauuugcuuugagcaaacgc

SEQ ID NO: 1939 - RNA, 21 nt, Artificial Sequence
  Synthetic
ggcguuugcucaaagcaaauc

SEQ ID NO: 1940 - RNA, 21 nt, Artificial Sequence
  Synthetic
gggcguuugcucaaagcaaau

SEQ ID NO: 1941 - RNA, 21 nt, Artificial Sequence
  Synthetic
ggggcguuugcucaaagcaaa

SEQ ID NO: 1942 - RNA, 21 nt, Artificial Sequence
  Synthetic
guaaguccugacugcggggcg

SEQ ID NO: 1943 - RNA, 21 nt, Artificial Sequence
  Synthetic
guccugacugcggggcguuug

SEQ ID NO: 1944 - RNA, 21 nt, Artificial Sequence
  Synthetic
uaaguccugacugcggggcgu

SEQ ID NO: 1945 - RNA, 21 nt, Artificial Sequence
  Synthetic
uccugacugcggggcguuugc

SEQ ID NO: 1946 - RNA, 21 nt, Artificial Sequence
  Synthetic
ugacugcggggcguuugcuca

SEQ ID NO: 1947 - RNA, 21 nt, Artificial Sequence
  Synthetic
ugagcaaacgccccgcaguca

SEQ ID NO: 1948 - RNA, 21 nt, Artificial Sequence
  Synthetic
ugcggggcguuugcucaaagc

SEQ ID NO: 1949 - RNA, 21 nt, Artificial Sequence
  Synthetic
ugcuuugagcaaacgccccgc

SEQ ID NO: 1950 - RNA, 21 nt, Artificial Sequence
  Synthetic
uggauuugcuuugagcaaacg

SEQ ID NO: 1951 - RNA, 21 nt, Artificial Sequence
  Synthetic
uugagcaaacgccccgcaguc

SEQ ID NO: 1952 - RNA, 21 nt, Artificial Sequence
  Synthetic
uugcuuugagcaaacgccccg

SEQ ID NO: 1953 - RNA, 21 nt, Artificial Sequence
  Synthetic
uuugagcaaacgccccgcagu

SEQ ID NO: 1954 - RNA, 21 nt, Artificial Sequence
  Synthetic
uuugcuuugagcaaacgcccc

SEQ ID NO: 1955 - RNA, 22 nt, Artificial Sequence
  Synthetic
aaacgccccgcagucaggacuu

SEQ ID NO: 1956 - RNA, 22 nt, Artificial Sequence
  Synthetic
aacgccccgcagucaggacuua

SEQ ID NO: 1957 - RNA, 22 nt, Artificial Sequence
  Synthetic
aaguccugacugcggggcguuu

SEQ ID NO: 1958 - RNA, 22 nt, Artificial Sequence
  Synthetic
acgccccgcagucaggacuuac

SEQ ID NO: 1959 - RNA, 22 nt, Artificial Sequence
  Synthetic
acugcggggcguuugcucaaag

SEQ ID NO: 1960 - RNA, 22 nt, Artificial Sequence
  Synthetic
agcaaacgccccgcagucagga

SEQ ID NO: 1961 - RNA, 22 nt, Artificial Sequence
  Synthetic
aggaguaaguccugacugcggg

SEQ ID NO: 1962 - RNA, 22 nt, Artificial Sequence
  Synthetic
aguaaguccugacugcggggcg

SEQ ID NO: 1963 - RNA, 22 nt, Artificial Sequence
  Synthetic
aguccugacugcggggcguuug

SEQ ID NO: 1964 - RNA, 22 nt, Artificial Sequence
  Synthetic
auggauuugcuuugagcaaacg

SEQ ID NO: 1965 - RNA, 22 nt, Artificial Sequence
  Synthetic
auuugcuuugagcaaacgcccc

SEQ ID NO: 1966 - RNA, 22 nt, Artificial Sequence
  Synthetic
caaacgccccgcagucaggacu

SEQ ID NO: 1967 - RNA, 22 nt, Artificial Sequence
  Synthetic
caggaguaaguccugacugcgg

SEQ ID NO: 1968 - RNA, 22 nt, Artificial Sequence
  Synthetic
cauggauuugcuuugagcaaac

SEQ ID NO: 1969 - RNA, 22 nt, Artificial Sequence
  Synthetic
ccaggaguaaguccugacugcg

SEQ ID NO: 1970 - RNA, 22 nt, Artificial Sequence
  Synthetic
ccauggauuugcuuugagcaaa

SEQ ID NO: 1971 - RNA, 22 nt, Artificial Sequence
  Synthetic
ccugacugcggggcguuugcuc

SEQ ID NO: 1972 - RNA, 22 nt, Artificial Sequence
  Synthetic
cgccccgcagucaggacuuacu

SEQ ID NO: 1973 - RNA, 22 nt, Artificial Sequence
  Synthetic
cggggcguuugcucaaagcaaa

SEQ ID NO: 1974 - RNA, 22 nt, Artificial Sequence
  Synthetic
cugacugcggggcguuugcuca

SEQ ID NO: 1975 - RNA, 22 nt, Artificial Sequence
  Synthetic
cugcggggcguuugcucaaagc

SEQ ID NO: 1976 - RNA, 22 nt, Artificial Sequence
  Synthetic
cuuugagcaaacgccccgcagu

SEQ ID NO: 1977 - RNA, 22 nt, Artificial Sequence
  Synthetic
gacugcggggcguuugcucaaa

SEQ ID NO: 1978 - RNA, 22 nt, Artificial Sequence
  Synthetic
gagcaaacgccccgcagucagg

SEQ ID NO: 1979 - RNA, 22 nt, Artificial Sequence
  Synthetic
gaguaaguccugacugcggggc

SEQ ID NO: 1980 - RNA, 22 nt, Artificial Sequence
  Synthetic
gauuugcuuugagcaaacgccc

SEQ ID NO: 1981 - RNA, 22 nt, Artificial Sequence
  Synthetic
gcaaacgccccgcagucaggac

SEQ ID NO: 1982 - RNA, 22 nt, Artificial Sequence
  Synthetic
gccauggauuugcuuugagcaa

SEQ ID NO: 1983 - RNA, 22 nt, Artificial Sequence
  Synthetic
gcggggcguuugcucaaagcaa

SEQ ID NO: 1984 - RNA, 22 nt, Artificial Sequence
  Synthetic
gcguuugcucaaagcaaaucca

SEQ ID NO: 1985 - RNA, 22 nt, Artificial Sequence
  Synthetic
gcuuugagcaaacgccccgcag

SEQ ID NO: 1986 - RNA, 22 nt, Artificial Sequence
  Synthetic
ggaguaaguccugacugcgggg

SEQ ID NO: 1987 - RNA, 22 nt, Artificial Sequence
  Synthetic
ggauuugcuuugagcaaacgcc

SEQ ID NO: 1988 - RNA, 22 nt, Artificial Sequence
  Synthetic
ggccauggauuugcuuugagca

SEQ ID NO: 1989 - RNA, 22 nt, Artificial Sequence
  Synthetic
ggcguuugcucaaagcaaaucc

SEQ ID NO: 1990 - RNA, 22 nt, Artificial Sequence
  Synthetic
gggcguuugcucaaagcaaauc

SEQ ID NO: 1991 - RNA, 22 nt, Artificial Sequence
  Synthetic
ggggcguuugcucaaagcaaau

SEQ ID NO: 1992 - RNA, 22 nt, Artificial Sequence
  Synthetic
guaaguccugacugcggggcgu

SEQ ID NO: 1993 - RNA, 22 nt, Artificial Sequence
  Synthetic
guccugacugcggggcguuugc

SEQ ID NO: 1994 - RNA, 22 nt, Artificial Sequence
  Synthetic
uaaguccugacugcggggcguu

SEQ ID NO: 1995 - RNA, 22 nt, Artificial Sequence
  Synthetic
uccugacugcggggcguuugcu

SEQ ID NO: 1996 - RNA, 22 nt, Artificial Sequence
  Synthetic
ugacugcggggcguuugcucaa

SEQ ID NO: 1997 - RNA, 22 nt, Artificial Sequence
  Synthetic
ugagcaaacgccccgcagucag

SEQ ID NO: 1998 - RNA, 22 nt, Artificial Sequence
  Synthetic
ugcggggcguuugcucaaagca

SEQ ID NO: 1999 - RNA, 22 nt, Artificial Sequence
  Synthetic
ugcuuugagcaaacgccccgca

SEQ ID NO: 2000 - RNA, 22 nt, Artificial Sequence
  Synthetic
uggauuugcuuugagcaaacgc

SEQ ID NO: 2001 - RNA, 22 nt, Artificial Sequence
  Synthetic
uugagcaaacgccccgcaguca

SEQ ID NO: 2002 - RNA, 22 nt, Artificial Sequence
  Synthetic
uugcuuugagcaaacgccccgc

SEQ ID NO: 2003 - RNA, 22 nt, Artificial Sequence
  Synthetic
uuugagcaaacgccccgcaguc

SEQ ID NO: 2004 - RNA, 22 nt, Artificial Sequence
  Synthetic
uuugcuuugagcaaacgccccg

SEQ ID NO: 2005 - RNA, 20 nt, Artificial Sequence
  Synthetic
aaagcaaauccauggcugau

SEQ ID NO: 2006 - RNA, 20 nt, Artificial Sequence
  Synthetic
aaauccauggcugauucugg

SEQ ID NO: 2007 - RNA, 20 nt, Artificial Sequence
  Synthetic
aacacuaccagaaucagcca

SEQ ID NO: 2008 - RNA, 20 nt, Artificial Sequence
  Synthetic
aagcaaauccauggcugauu

SEQ ID NO: 2009 - RNA, 20 nt, Artificial Sequence
  Synthetic
aaucagccauggauuugcuu

SEQ ID NO: 2010 - RNA, 20 nt, Artificial Sequence
  Synthetic
aauccauggcugauucuggu

SEQ ID NO: 2011 - RNA, 20 nt, Artificial Sequence
  Synthetic
acacuaccagaaucagccau

SEQ ID NO: 2012 - RNA, 20 nt, Artificial Sequence
  Synthetic
accagaaucagccauggauu

SEQ ID NO: 2013 - RNA, 20 nt, Artificial Sequence
  Synthetic
acuaccagaaucagccaugg

SEQ ID NO: 2014 - RNA, 20 nt, Artificial Sequence
  Synthetic
agaaucagccauggauuugc

SEQ ID NO: 2015 - RNA, 20 nt, Artificial Sequence
  Synthetic
agcaaauccauggcugauuc

SEQ ID NO: 2016 - RNA, 20 nt, Artificial Sequence
  Synthetic
aucagccauggauuugcuuu

SEQ ID NO: 2017 - RNA, 20 nt, Artificial Sequence
  Synthetic
auccauggcugauucuggua

SEQ ID NO: 2018 - RNA, 20 nt, Artificial Sequence
  Synthetic
augcugaacacuaccagaau

SEQ ID NO: 2019 - RNA, 20 nt, Artificial Sequence
  Synthetic
auggcugauucugguagugu

SEQ ID NO: 2020 - RNA, 20 nt, Artificial Sequence
  Synthetic
caaagcaaauccauggcuga

SEQ ID NO: 2021 - RNA, 20 nt, Artificial Sequence
  Synthetic
caaauccauggcugauucug

SEQ ID NO: 2022 - RNA, 20 nt, Artificial Sequence
  Synthetic
cacuaccagaaucagccaug

SEQ ID NO: 2023 - RNA, 20 nt, Artificial Sequence
  Synthetic
cagaaucagccauggauuug

SEQ ID NO: 2024 - RNA, 20 nt, Artificial Sequence
  Synthetic
cagccauggauuugcuuuga

SEQ ID NO: 2025 - RNA, 20 nt, Artificial Sequence
  Synthetic
cauggcugauucugguagug

SEQ ID NO: 2026 - RNA, 20 nt, Artificial Sequence
  Synthetic
ccagaaucagccauggauuu

SEQ ID NO: 2027 - RNA, 20 nt, Artificial Sequence
  Synthetic
ccauggcugauucugguagu

SEQ ID NO: 2028 - RNA, 20 nt, Artificial Sequence
  Synthetic
cuaccagaaucagccaugga

SEQ ID NO: 2029 - RNA, 20 nt, Artificial Sequence
  Synthetic
cucaaagcaaauccauggcu

SEQ ID NO: 2030 - RNA, 20 nt, Artificial Sequence
  Synthetic
cugaacacuaccagaaucag

SEQ ID NO: 2031 - RNA, 20 nt, Artificial Sequence
  Synthetic
cugauucugguaguguucag

SEQ ID NO: 2032 - RNA, 20 nt, Artificial Sequence
  Synthetic
gaacacuaccagaaucagcc

SEQ ID NO: 2033 - RNA, 20 nt, Artificial Sequence
  Synthetic
gaaucagccauggauuugcu

SEQ ID NO: 2034 - RNA, 20 nt, Artificial Sequence
  Synthetic
gaugcugaacacuaccagaa

SEQ ID NO: 2035 - RNA, 20 nt, Artificial Sequence
  Synthetic
gcaaauccauggcugauucu

SEQ ID NO: 2036 - RNA, 20 nt, Artificial Sequence
  Synthetic
gcucaaagcaaauccauggc

SEQ ID NO: 2037 - RNA, 20 nt, Artificial Sequence
  Synthetic
gcugaacacuaccagaauca

SEQ ID NO: 2038 - RNA, 20 nt, Artificial Sequence
  Synthetic
gcugauucugguaguguuca

SEQ ID NO: 2039 - RNA, 20 nt, Artificial Sequence
  Synthetic
ggcugauucugguaguguuc

SEQ ID NO: 2040 - RNA, 20 nt, Artificial Sequence
  Synthetic
uaccagaaucagccauggau

SEQ ID NO: 2041 - RNA, 20 nt, Artificial Sequence
  Synthetic
ucaaagcaaauccauggcug

SEQ ID NO: 2042 - RNA, 20 nt, Artificial Sequence
  Synthetic
ucagccauggauuugcuuug

SEQ ID NO: 2043 - RNA, 20 nt, Artificial Sequence
  Synthetic
uccauggcugauucugguag

SEQ ID NO: 2044 - RNA, 20 nt, Artificial Sequence
  Synthetic
ugaacacuaccagaaucagc

SEQ ID NO: 2045 - RNA, 20 nt, Artificial Sequence
  Synthetic
ugaugcugaacacuaccaga

SEQ ID NO: 2046 - RNA, 20 nt, Artificial Sequence
  Synthetic
ugcucaaagcaaauccaugg

SEQ ID NO: 2047 - RNA, 20 nt, Artificial Sequence
  Synthetic
ugcugaacacuaccagaauc

SEQ ID NO: 2048 - RNA, 20 nt, Artificial Sequence
  Synthetic
uggcugauucugguaguguu

SEQ ID NO: 2049 - RNA, 20 nt, Artificial Sequence
  Synthetic
uugcucaaagcaaauccaug

SEQ ID NO: 2050 - RNA, 20 nt, Artificial Sequence
  Synthetic
uuugcucaaagcaaauccau

SEQ ID NO: 2051 - RNA, 21 nt, Artificial Sequence
  Synthetic
aaagcaaauccauggcugauu

SEQ ID NO: 2052 - RNA, 21 nt, Artificial Sequence
  Synthetic
aaauccauggcugauucuggu

SEQ ID NO: 2053 - RNA, 21 nt, Artificial Sequence
  Synthetic
aacacuaccagaaucagccau

SEQ ID NO: 2054 - RNA, 21 nt, Artificial Sequence
  Synthetic
aagcaaauccauggcugauuc

SEQ ID NO: 2055 - RNA, 21 nt, Artificial Sequence
  Synthetic
aaucagccauggauuugcuuu

SEQ ID NO: 2056 - RNA, 21 nt, Artificial Sequence
  Synthetic
aauccauggcugauucuggua

SEQ ID NO: 2057 - RNA, 21 nt, Artificial Sequence
  Synthetic
acacuaccagaaucagccaug

SEQ ID NO: 2058 - RNA, 21 nt, Artificial Sequence
  Synthetic
accagaaucagccauggauuu

SEQ ID NO: 2059 - RNA, 21 nt, Artificial Sequence
  Synthetic
acuaccagaaucagccaugga

SEQ ID NO: 2060 - RNA, 21 nt, Artificial Sequence
  Synthetic
agaaucagccauggauuugcu

SEQ ID NO: 2061 - RNA, 21 nt, Artificial Sequence
  Synthetic
agcaaauccauggcugauucu

SEQ ID NO: 2062 - RNA, 21 nt, Artificial Sequence
  Synthetic
aucagccauggauuugcuuug

SEQ ID NO: 2063 - RNA, 21 nt, Artificial Sequence
  Synthetic
auccauggcugauucugguag

SEQ ID NO: 2064 - RNA, 21 nt, Artificial Sequence
  Synthetic
augcugaacacuaccagaauc

SEQ ID NO: 2065 - RNA, 21 nt, Artificial Sequence
  Synthetic
auggcugauucugguaguguu

SEQ ID NO: 2066 - RNA, 21 nt, Artificial Sequence
  Synthetic
caaagcaaauccauggcugau

SEQ ID NO: 2067 - RNA, 21 nt, Artificial Sequence
  Synthetic
caaauccauggcugauucugg

SEQ ID NO: 2068 - RNA, 21 nt, Artificial Sequence
  Synthetic
cacuaccagaaucagccaugg

SEQ ID NO: 2069 - RNA, 21 nt, Artificial Sequence
  Synthetic
cagaaucagccauggauuugc

SEQ ID NO: 2070 - RNA, 21 nt, Artificial Sequence
  Synthetic
cagccauggauuugcuuugag

SEQ ID NO: 2071 - RNA, 21 nt, Artificial Sequence
  Synthetic
cauggcugauucugguagugu

SEQ ID NO: 2072 - RNA, 21 nt, Artificial Sequence
  Synthetic
ccagaaucagccauggauuug

SEQ ID NO: 2073 - RNA, 21 nt, Artificial Sequence
  Synthetic
ccauggcugauucugguagug

SEQ ID NO: 2074 - RNA, 21 nt, Artificial Sequence
  Synthetic
cuaccagaaucagccauggau

SEQ ID NO: 2075 - RNA, 21 nt, Artificial Sequence
  Synthetic
cucaaagcaaauccauggcug

SEQ ID NO: 2076 - RNA, 21 nt, Artificial Sequence
  Synthetic
cugaacacuaccagaaucagc

SEQ ID NO: 2077 - RNA, 21 nt, Artificial Sequence
  Synthetic
cugaugcugaacacuaccaga

SEQ ID NO: 2078 - RNA, 21 nt, Artificial Sequence
  Synthetic
cugauucugguaguguucagc

SEQ ID NO: 2079 - RNA, 21 nt, Artificial Sequence
  Synthetic
gaacacuaccagaaucagcca

SEQ ID NO: 2080 - RNA, 21 nt, Artificial Sequence
  Synthetic
gaaucagccauggauuugcuu

SEQ ID NO: 2081 - RNA, 21 nt, Artificial Sequence
  Synthetic
gaugcugaacacuaccagaau

SEQ ID NO: 2082 - RNA, 21 nt, Artificial Sequence
  Synthetic
gcaaauccauggcugauucug

SEQ ID NO: 2083 - RNA, 21 nt, Artificial Sequence
  Synthetic
gcucaaagcaaauccauggcu

SEQ ID NO: 2084 - RNA, 21 nt, Artificial Sequence
  Synthetic
gcugaacacuaccagaaucag

SEQ ID NO: 2085 - RNA, 21 nt, Artificial Sequence
  Synthetic
gcugauucugguaguguucag

SEQ ID NO: 2086 - RNA, 21 nt, Artificial Sequence
  Synthetic
ggcugauucugguaguguuca

SEQ ID NO: 2087 - RNA, 21 nt, Artificial Sequence
  Synthetic
guuugcucaaagcaaauccau

SEQ ID NO: 2088 - RNA, 21 nt, Artificial Sequence
  Synthetic
uaccagaaucagccauggauu

SEQ ID NO: 2089 - RNA, 21 nt, Artificial Sequence
  Synthetic
ucaaagcaaauccauggcuga

SEQ ID NO: 2090 - RNA, 21 nt, Artificial Sequence
  Synthetic
ucagccauggauuugcuuuga

SEQ ID NO: 2091 - RNA, 21 nt, Artificial Sequence
  Synthetic
uccauggcugauucugguagu

SEQ ID NO: 2092 - RNA, 21 nt, Artificial Sequence
  Synthetic
ugaacacuaccagaaucagcc

SEQ ID NO: 2093 - RNA, 21 nt, Artificial Sequence
  Synthetic
ugaugcugaacacuaccagaa

SEQ ID NO: 2094 - RNA, 21 nt, Artificial Sequence
  Synthetic
ugcucaaagcaaauccauggc

SEQ ID NO: 2095 - RNA, 21 nt, Artificial Sequence
  Synthetic
ugcugaacacuaccagaauca

SEQ ID NO: 2096 - RNA, 21 nt, Artificial Sequence
  Synthetic
uggcugauucugguaguguuc

SEQ ID NO: 2097 - RNA, 21 nt, Artificial Sequence
  Synthetic
uugcucaaagcaaauccaugg

SEQ ID NO: 2098 - RNA, 21 nt, Artificial Sequence
  Synthetic
uuugcucaaagcaaauccaug

SEQ ID NO: 2099 - RNA, 22 nt, Artificial Sequence
  Synthetic
aaagcaaauccauggcugauuc

SEQ ID NO: 2100 - RNA, 22 nt, Artificial Sequence
  Synthetic
aaauccauggcugauucuggua

SEQ ID NO: 2101 - RNA, 22 nt, Artificial Sequence
  Synthetic
aacacuaccagaaucagccaug

SEQ ID NO: 2102 - RNA, 22 nt, Artificial Sequence
  Synthetic
aagcaaauccauggcugauucu

SEQ ID NO: 2103 - RNA, 22 nt, Artificial Sequence
  Synthetic
aaucagccauggauuugcuuug

SEQ ID NO: 2104 - RNA, 22 nt, Artificial Sequence
  Synthetic
aauccauggcugauucugguag

SEQ ID NO: 2105 - RNA, 22 nt, Artificial Sequence
  Synthetic
acacuaccagaaucagccaugg

SEQ ID NO: 2106 - RNA, 22 nt, Artificial Sequence
  Synthetic
accagaaucagccauggauuug

SEQ ID NO: 2107 - RNA, 22 nt, Artificial Sequence
  Synthetic
acuaccagaaucagccauggau

SEQ ID NO: 2108 - RNA, 22 nt, Artificial Sequence
  Synthetic
agaaucagccauggauuugcuu

SEQ ID NO: 2109 - RNA, 22 nt, Artificial Sequence
  Synthetic
agcaaauccauggcugauucug

SEQ ID NO: 2110 - RNA, 22 nt, Artificial Sequence
  Synthetic
aucagccauggauuugcuuuga

SEQ ID NO: 2111 - RNA, 22 nt, Artificial Sequence
  Synthetic
auccauggcugauucugguagu

SEQ ID NO: 2112 - RNA, 22 nt, Artificial Sequence
  Synthetic
augcugaacacuaccagaauca

SEQ ID NO: 2113 - RNA, 22 nt, Artificial Sequence
  Synthetic
auggcugauucugguaguguuc

SEQ ID NO: 2114 - RNA, 22 nt, Artificial Sequence
  Synthetic
caaagcaaauccauggcugauu

SEQ ID NO: 2115 - RNA, 22 nt, Artificial Sequence
  Synthetic
caaauccauggcugauucuggu

SEQ ID NO: 2116 - RNA, 22 nt, Artificial Sequence
  Synthetic
cacuaccagaaucagccaugga

SEQ ID NO: 2117 - RNA, 22 nt, Artificial Sequence
  Synthetic
cagaaucagccauggauuugcu

SEQ ID NO: 2118 - RNA, 22 nt, Artificial Sequence
  Synthetic
cagccauggauuugcuuugagc

SEQ ID NO: 2119 - RNA, 22 nt, Artificial Sequence
  Synthetic
cauggcugauucugguaguguu

SEQ ID NO: 2120 - RNA, 22 nt, Artificial Sequence
  Synthetic
ccagaaucagccauggauuugc

SEQ ID NO: 2121 - RNA, 22 nt, Artificial Sequence
  Synthetic
ccauggcugauucugguagugu

SEQ ID NO: 2122 - RNA, 22 nt, Artificial Sequence
  Synthetic
cuaccagaaucagccauggauu

SEQ ID NO: 2123 - RNA, 22 nt, Artificial Sequence
  Synthetic
cucaaagcaaauccauggcuga

SEQ ID NO: 2124 - RNA, 22 nt, Artificial Sequence
  Synthetic
cugaacacuaccagaaucagcc

SEQ ID NO: 2125 - RNA, 22 nt, Artificial Sequence
  Synthetic
cugaugcugaacacuaccagaa

SEQ ID NO: 2126 - RNA, 22 nt, Artificial Sequence
  Synthetic
cugauucugguaguguucagca

SEQ ID NO: 2127 - RNA, 22 nt, Artificial Sequence
  Synthetic
gaacacuaccagaaucagccau

SEQ ID NO: 2128 - RNA, 22 nt, Artificial Sequence
  Synthetic
gaaucagccauggauuugcuuu

SEQ ID NO: 2129 - RNA, 22 nt, Artificial Sequence
  Synthetic
gaugcugaacacuaccagaauc

SEQ ID NO: 2130 - RNA, 22 nt, Artificial Sequence
  Synthetic
gcaaauccauggcugauucugg

SEQ ID NO: 2131 - RNA, 22 nt, Artificial Sequence
  Synthetic
gcucaaagcaaauccauggcug

SEQ ID NO: 2132 - RNA, 22 nt, Artificial Sequence
  Synthetic
gcugaacacuaccagaaucagc

SEQ ID NO: 2133 - RNA, 22 nt, Artificial Sequence
  Synthetic
gcugauucugguaguguucagc

SEQ ID NO: 2134 - RNA, 22 nt, Artificial Sequence
  Synthetic
ggcugauucugguaguguucag

SEQ ID NO: 2135 - RNA, 22 nt, Artificial Sequence
  Synthetic
guuugcucaaagcaaauccaug

SEQ ID NO: 2136 - RNA, 22 nt, Artificial Sequence
  Synthetic
uaccagaaucagccauggauuu

SEQ ID NO: 2137 - RNA, 22 nt, Artificial Sequence
  Synthetic
ucaaagcaaauccauggcugau

SEQ ID NO: 2138 - RNA, 22 nt, Artificial Sequence
  Synthetic
ucagccauggauuugcuuugag

SEQ ID NO: 2139 - RNA, 22 nt, Artificial Sequence
  Synthetic
uccauggcugauucugguagug

SEQ ID NO: 2140 - RNA, 22 nt, Artificial Sequence
  Synthetic
ucugaugcugaacacuaccaga

SEQ ID NO: 2141 - RNA, 22 nt, Artificial Sequence
  Synthetic
ugaacacuaccagaaucagcca

SEQ ID NO: 2142 - RNA, 22 nt, Artificial Sequence
  Synthetic
ugaugcugaacacuaccagaau

SEQ ID NO: 2143 - RNA, 22 nt, Artificial Sequence
  Synthetic
ugcucaaagcaaauccauggcu

SEQ ID NO: 2144 - RNA, 22 nt, Artificial Sequence
  Synthetic
ugcugaacacuaccagaaucag

SEQ ID NO: 2145 - RNA, 22 nt, Artificial Sequence
  Synthetic
uggcugauucugguaguguuca

SEQ ID NO: 2146 - RNA, 22 nt, Artificial Sequence
  Synthetic
uguuugcucaaagcaaauccau

SEQ ID NO: 2147 - RNA, 22 nt, Artificial Sequence
  Synthetic
uugcucaaagcaaauccauggc

SEQ ID NO: 2148 - RNA, 22 nt, Artificial Sequence
  Synthetic
uuugcucaaagcaaauccaugg

SEQ ID NO: 2149 - RNA, 20 nt, Artificial Sequence
  Synthetic
aacauucugguugcucugau

SEQ ID NO: 2150 - RNA, 20 nt, Artificial Sequence
  Synthetic
aaccagaauguuccugucua

SEQ ID NO: 2151 - RNA, 20 nt, Artificial Sequence
  Synthetic
acaggaacauucugguugcu

SEQ ID NO: 2152 - RNA, 20 nt, Artificial Sequence
  Synthetic
acauucugguugcucugaug

SEQ ID NO: 2153 - RNA, 20 nt, Artificial Sequence
  Synthetic
agacaggaacauucugguug

SEQ ID NO: 2154 - RNA, 20 nt, Artificial Sequence
  Synthetic
agagcaaccagaauguuccu

SEQ ID NO: 2155 - RNA, 20 nt, Artificial Sequence
  Synthetic
agcaaccagaauguuccugu

SEQ ID NO: 2156 - RNA, 20 nt, Artificial Sequence
  Synthetic
agcaucagagcaaccagaau

SEQ ID NO: 2157 - RNA, 20 nt, Artificial Sequence
  Synthetic
aggaacauucugguugcucu

SEQ ID NO: 2158 - RNA, 20 nt, Artificial Sequence
  Synthetic
aguguucagcaucagagcaa

SEQ ID NO: 2159 - RNA, 20 nt, Artificial Sequence
  Synthetic
auagacaggaacauucuggu

SEQ ID NO: 2160 - RNA, 20 nt, Artificial Sequence
  Synthetic
aucagagcaaccagaauguu

SEQ ID NO: 2161 - RNA, 20 nt, Artificial Sequence
  Synthetic
auucugguugcucugaugcu

SEQ ID NO: 2162 - RNA, 20 nt, Artificial Sequence
  Synthetic
caaccagaauguuccugucu

SEQ ID NO: 2163 - RNA, 20 nt, Artificial Sequence
  Synthetic
cagagcaaccagaauguucc

SEQ ID NO: 2164 - RNA, 20 nt, Artificial Sequence
  Synthetic
cagcaucagagcaaccagaa

SEQ ID NO: 2165 - RNA, 20 nt, Artificial Sequence
  Synthetic
caggaacauucugguugcuc

SEQ ID NO: 2166 - RNA, 20 nt, Artificial Sequence
  Synthetic
cauagacaggaacauucugg

SEQ ID NO: 2167 - RNA, 20 nt, Artificial Sequence
  Synthetic
caucagagcaaccagaaugu

SEQ ID NO: 2168 - RNA, 20 nt, Artificial Sequence
  Synthetic
cauucugguugcucugaugc

SEQ ID NO: 2169 - RNA, 20 nt, Artificial Sequence
  Synthetic
ccauagacaggaacauucug

SEQ ID NO: 2170 - RNA, 20 nt, Artificial Sequence
  Synthetic
cugguugcucugaugcugaa

SEQ ID NO: 2171 - RNA, 20 nt, Artificial Sequence
  Synthetic
gaacauucugguugcucuga

SEQ ID NO: 2172 - RNA, 20 nt, Artificial Sequence
  Synthetic
gacaggaacauucugguugc

SEQ ID NO: 2173 - RNA, 20 nt, Artificial Sequence
  Synthetic
gagcaaccagaauguuccug

SEQ ID NO: 2174 - RNA, 20 nt, Artificial Sequence
  Synthetic
gcaaccagaauguuccuguc

SEQ ID NO: 2175 - RNA, 20 nt, Artificial Sequence
  Synthetic
gcaucagagcaaccagaaug

SEQ ID NO: 2176 - RNA, 20 nt, Artificial Sequence
  Synthetic
ggaacauucugguugcucug

SEQ ID NO: 2177 - RNA, 20 nt, Artificial Sequence
  Synthetic
gguaguguucagcaucagag

SEQ ID NO: 2178 - RNA, 20 nt, Artificial Sequence
  Synthetic
gguugcucugaugcugaaca

SEQ ID NO: 2179 - RNA, 20 nt, Artificial Sequence
  Synthetic
guaguguucagcaucagagc

SEQ ID NO: 2180 - RNA, 20 nt, Artificial Sequence
  Synthetic
guguucagcaucagagcaac

SEQ ID NO: 2181 - RNA, 20 nt, Artificial Sequence
  Synthetic
guucagcaucagagcaacca

SEQ ID NO: 2182 - RNA, 20 nt, Artificial Sequence
  Synthetic
guugcucugaugcugaacac

SEQ ID NO: 2183 - RNA, 20 nt, Artificial Sequence
  Synthetic
uagacaggaacauucugguu

SEQ ID NO: 2184 - RNA, 20 nt, Artificial Sequence
  Synthetic
uaguguucagcaucagagca

SEQ ID NO: 2185 - RNA, 20 nt, Artificial Sequence
  Synthetic
ucagagcaaccagaauguuc

SEQ ID NO: 2186 - RNA, 20 nt, Artificial Sequence
  Synthetic
ucagcaucagagcaaccaga

SEQ ID NO: 2187 - RNA, 20 nt, Artificial Sequence
  Synthetic
uccauagacaggaacauucu

SEQ ID NO: 2188 - RNA, 20 nt, Artificial Sequence
  Synthetic
ucugguugcucugaugcuga

SEQ ID NO: 2189 - RNA, 20 nt, Artificial Sequence
  Synthetic
ugguaguguucagcaucaga

SEQ ID NO: 2190 - RNA, 20 nt, Artificial Sequence
  Synthetic
ugguugcucugaugcugaac

SEQ ID NO: 2191 - RNA, 20 nt, Artificial Sequence
  Synthetic
uguucagcaucagagcaacc

SEQ ID NO: 2192 - RNA, 20 nt, Artificial Sequence
  Synthetic
uucagcaucagagcaaccag

SEQ ID NO: 2193 - RNA, 20 nt, Artificial Sequence
  Synthetic
uuccauagacaggaacauuc

SEQ ID NO: 2194 - RNA, 20 nt, Artificial Sequence
  Synthetic
uucugguugcucugaugcug

SEQ ID NO: 2195 - RNA, 21 nt, Artificial Sequence
  Synthetic
aacauucugguugcucugaug

SEQ ID NO: 2196 - RNA, 21 nt, Artificial Sequence
  Synthetic
aaccagaauguuccugucuau

SEQ ID NO: 2197 - RNA, 21 nt, Artificial Sequence
  Synthetic
acaggaacauucugguugcuc

SEQ ID NO: 2198 - RNA, 21 nt, Artificial Sequence
  Synthetic
acauucugguugcucugaugc

SEQ ID NO: 2199 - RNA, 21 nt, Artificial Sequence
  Synthetic
agacaggaacauucugguugc

SEQ ID NO: 2200 - RNA, 21 nt, Artificial Sequence
  Synthetic
agagcaaccagaauguuccug

SEQ ID NO: 2201 - RNA, 21 nt, Artificial Sequence
  Synthetic
agcaaccagaauguuccuguc

SEQ ID NO: 2202 - RNA, 21 nt, Artificial Sequence
  Synthetic
agcaucagagcaaccagaaug

SEQ ID NO: 2203 - RNA, 21 nt, Artificial Sequence
  Synthetic
aggaacauucugguugcucug

SEQ ID NO: 2204 - RNA, 21 nt, Artificial Sequence
  Synthetic
aguguucagcaucagagcaac

SEQ ID NO: 2205 - RNA, 21 nt, Artificial Sequence
  Synthetic
auagacaggaacauucugguu

SEQ ID NO: 2206 - RNA, 21 nt, Artificial Sequence
  Synthetic
aucagagcaaccagaauguuc

SEQ ID NO: 2207 - RNA, 21 nt, Artificial Sequence
  Synthetic
auucugguugcucugaugcug

SEQ ID NO: 2208 - RNA, 21 nt, Artificial Sequence
  Synthetic
caaccagaauguuccugucua

SEQ ID NO: 2209 - RNA, 21 nt, Artificial Sequence
  Synthetic
cagagcaaccagaauguuccu

SEQ ID NO: 2210 - RNA, 21 nt, Artificial Sequence
  Synthetic
cagcaucagagcaaccagaau

SEQ ID NO: 2211 - RNA, 21 nt, Artificial Sequence
  Synthetic
caggaacauucugguugcucu

SEQ ID NO: 2212 - RNA, 21 nt, Artificial Sequence
  Synthetic
cauagacaggaacauucuggu

SEQ ID NO: 2213 - RNA, 21 nt, Artificial Sequence
  Synthetic
caucagagcaaccagaauguu

SEQ ID NO: 2214 - RNA, 21 nt, Artificial Sequence
  Synthetic
cauucugguugcucugaugcu

SEQ ID NO: 2215 - RNA, 21 nt, Artificial Sequence
  Synthetic
ccauagacaggaacauucugg

SEQ ID NO: 2216 - RNA, 21 nt, Artificial Sequence
  Synthetic
cugguaguguucagcaucaga

SEQ ID NO: 2217 - RNA, 21 nt, Artificial Sequence
  Synthetic
cugguugcucugaugcugaac

SEQ ID NO: 2218 - RNA, 21 nt, Artificial Sequence
  Synthetic
cuuccauagacaggaacauuc

SEQ ID NO: 2219 - RNA, 21 nt, Artificial Sequence
  Synthetic
gaacauucugguugcucugau

SEQ ID NO: 2220 - RNA, 21 nt, Artificial Sequence
  Synthetic
gacaggaacauucugguugcu

SEQ ID NO: 2221 - RNA, 21 nt, Artificial Sequence
  Synthetic
gagcaaccagaauguuccugu

SEQ ID NO: 2222 - RNA, 21 nt, Artificial Sequence
  Synthetic
gcaaccagaauguuccugucu

SEQ ID NO: 2223 - RNA, 21 nt, Artificial Sequence
  Synthetic
gcaucagagcaaccagaaugu

SEQ ID NO: 2224 - RNA, 21 nt, Artificial Sequence
  Synthetic
ggaacauucugguugcucuga

SEQ ID NO: 2225 - RNA, 21 nt, Artificial Sequence
  Synthetic
gguaguguucagcaucagagc

SEQ ID NO: 2226 - RNA, 21 nt, Artificial Sequence
  Synthetic
gguugcucugaugcugaacac

SEQ ID NO: 2227 - RNA, 21 nt, Artificial Sequence
  Synthetic
guaguguucagcaucagagca

SEQ ID NO: 2228 - RNA, 21 nt, Artificial Sequence
  Synthetic
guguucagcaucagagcaacc

SEQ ID NO: 2229 - RNA, 21 nt, Artificial Sequence
  Synthetic
guucagcaucagagcaaccag

SEQ ID NO: 2230 - RNA, 21 nt, Artificial Sequence
  Synthetic
guugcucugaugcugaacacu

SEQ ID NO: 2231 - RNA, 21 nt, Artificial Sequence
  Synthetic
uagacaggaacauucugguug

SEQ ID NO: 2232 - RNA, 21 nt, Artificial Sequence
  Synthetic
uaguguucagcaucagagcaa

SEQ ID NO: 2233 - RNA, 21 nt, Artificial Sequence
  Synthetic
ucagagcaaccagaauguucc

SEQ ID NO: 2234 - RNA, 21 nt, Artificial Sequence
  Synthetic
ucagcaucagagcaaccagaa

SEQ ID NO: 2235 - RNA, 21 nt, Artificial Sequence
  Synthetic
uccauagacaggaacauucug

SEQ ID NO: 2236 - RNA, 21 nt, Artificial Sequence
  Synthetic
ucugguugcucugaugcugaa

SEQ ID NO: 2237 - RNA, 21 nt, Artificial Sequence
  Synthetic
ugguaguguucagcaucagag

SEQ ID NO: 2238 - RNA, 21 nt, Artificial Sequence
  Synthetic
ugguugcucugaugcugaaca

SEQ ID NO: 2239 - RNA, 21 nt, Artificial Sequence
  Synthetic
uguucagcaucagagcaacca

SEQ ID NO: 2240 - RNA, 21 nt, Artificial Sequence
  Synthetic
uucagcaucagagcaaccaga

SEQ ID NO: 2241 - RNA, 21 nt, Artificial Sequence
  Synthetic
uuccauagacaggaacauucu

SEQ ID NO: 2242 - RNA, 21 nt, Artificial Sequence
  Synthetic
uucugguugcucugaugcuga

SEQ ID NO: 2243 - RNA, 22 nt, Artificial Sequence
  Synthetic
aacauucugguugcucugaugc

SEQ ID NO: 2244 - RNA, 22 nt, Artificial Sequence
  Synthetic
aaccagaauguuccugucuaug

SEQ ID NO: 2245 - RNA, 22 nt, Artificial Sequence
  Synthetic
acaggaacauucugguugcucu

SEQ ID NO: 2246 - RNA, 22 nt, Artificial Sequence
  Synthetic
acauucugguugcucugaugcu

SEQ ID NO: 2247 - RNA, 22 nt, Artificial Sequence
  Synthetic
acuuccauagacaggaacauuc

SEQ ID NO: 2248 - RNA, 22 nt, Artificial Sequence
  Synthetic
agacaggaacauucugguugcu

SEQ ID NO: 2249 - RNA, 22 nt, Artificial Sequence
  Synthetic
agagcaaccagaauguuccugu

SEQ ID NO: 2250 - RNA, 22 nt, Artificial Sequence
  Synthetic
agcaaccagaauguuccugucu

SEQ ID NO: 2251 - RNA, 22 nt, Artificial Sequence
  Synthetic
agcaucagagcaaccagaaugu

SEQ ID NO: 2252 - RNA, 22 nt, Artificial Sequence
  Synthetic
aggaacauucugguugcucuga

SEQ ID NO: 2253 - RNA, 22 nt, Artificial Sequence
  Synthetic
aguguucagcaucagagcaacc

SEQ ID NO: 2254 - RNA, 22 nt, Artificial Sequence
  Synthetic
auagacaggaacauucugguug

SEQ ID NO: 2255 - RNA, 22 nt, Artificial Sequence
  Synthetic
aucagagcaaccagaauguucc

SEQ ID NO: 2256 - RNA, 22 nt, Artificial Sequence
  Synthetic
auucugguugcucugaugcuga

SEQ ID NO: 2257 - RNA, 22 nt, Artificial Sequence
  Synthetic
caaccagaauguuccugucuau

SEQ ID NO: 2258 - RNA, 22 nt, Artificial Sequence
  Synthetic
cagagcaaccagaauguuccug

SEQ ID NO: 2259 - RNA, 22 nt, Artificial Sequence
  Synthetic
cagcaucagagcaaccagaaug

SEQ ID NO: 2260 - RNA, 22 nt, Artificial Sequence
  Synthetic
caggaacauucugguugcucug

SEQ ID NO: 2261 - RNA, 22 nt, Artificial Sequence
  Synthetic
cauagacaggaacauucugguu

SEQ ID NO: 2262 - RNA, 22 nt, Artificial Sequence
  Synthetic
caucagagcaaccagaauguuc

SEQ ID NO: 2263 - RNA, 22 nt, Artificial Sequence
  Synthetic
cauucugguugcucugaugcug

SEQ ID NO: 2264 - RNA, 22 nt, Artificial Sequence
  Synthetic
ccauagacaggaacauucuggu

SEQ ID NO: 2265 - RNA, 22 nt, Artificial Sequence
  Synthetic
cugguaguguucagcaucagag

SEQ ID NO: 2266 - RNA, 22 nt, Artificial Sequence
  Synthetic
cugguugcucugaugcugaaca

SEQ ID NO: 2267 - RNA, 22 nt, Artificial Sequence
  Synthetic
cuuccauagacaggaacauucu

SEQ ID NO: 2268 - RNA, 22 nt, Artificial Sequence
  Synthetic
gaacauucugguugcucugaug

SEQ ID NO: 2269 - RNA, 22 nt, Artificial Sequence
  Synthetic
gacaggaacauucugguugcuc

SEQ ID NO: 2270 - RNA, 22 nt, Artificial Sequence
  Synthetic
gagcaaccagaauguuccuguc

SEQ ID NO: 2271 - RNA, 22 nt, Artificial Sequence
  Synthetic
gcaaccagaauguuccugucua

SEQ ID NO: 2272 - RNA, 22 nt, Artificial Sequence
  Synthetic
gcaucagagcaaccagaauguu

SEQ ID NO: 2273 - RNA, 22 nt, Artificial Sequence
  Synthetic
ggaacauucugguugcucugau

SEQ ID NO: 2274 - RNA, 22 nt, Artificial Sequence
  Synthetic
gguaguguucagcaucagagca

SEQ ID NO: 2275 - RNA, 22 nt, Artificial Sequence
  Synthetic
gguugcucugaugcugaacacu

SEQ ID NO: 2276 - RNA, 22 nt, Artificial Sequence
  Synthetic
guaguguucagcaucagagcaa

SEQ ID NO: 2277 - RNA, 22 nt, Artificial Sequence
  Synthetic
guguucagcaucagagcaacca

SEQ ID NO: 2278 - RNA, 22 nt, Artificial Sequence
  Synthetic
guucagcaucagagcaaccaga

SEQ ID NO: 2279 - RNA, 22 nt, Artificial Sequence
  Synthetic
guugcucugaugcugaacacua

SEQ ID NO: 2280 - RNA, 22 nt, Artificial Sequence
  Synthetic
uagacaggaacauucugguugc

SEQ ID NO: 2281 - RNA, 22 nt, Artificial Sequence
  Synthetic
uaguguucagcaucagagcaac

SEQ ID NO: 2282 - RNA, 22 nt, Artificial Sequence
  Synthetic
ucagagcaaccagaauguuccu

SEQ ID NO: 2283 - RNA, 22 nt, Artificial Sequence
  Synthetic
ucagcaucagagcaaccagaau

SEQ ID NO: 2284 - RNA, 22 nt, Artificial Sequence
  Synthetic
uccauagacaggaacauucugg

SEQ ID NO: 2285 - RNA, 22 nt, Artificial Sequence
  Synthetic
ucugguaguguucagcaucaga

SEQ ID NO: 2286 - RNA, 22 nt, Artificial Sequence
  Synthetic
ucugguugcucugaugcugaac

SEQ ID NO: 2287 - RNA, 22 nt, Artificial Sequence
  Synthetic
ugguaguguucagcaucagagc

SEQ ID NO: 2288 - RNA, 22 nt, Artificial Sequence
  Synthetic
ugguugcucugaugcugaacac

SEQ ID NO: 2289 - RNA, 22 nt, Artificial Sequence
  Synthetic
uguucagcaucagagcaaccag

SEQ ID NO: 2290 - RNA, 22 nt, Artificial Sequence
  Synthetic
uucagcaucagagcaaccagaa

SEQ ID NO: 2291 - RNA, 22 nt, Artificial Sequence
  Synthetic
uuccauagacaggaacauucug

SEQ ID NO: 2292 - RNA, 22 nt, Artificial Sequence
  Synthetic
uucugguugcucugaugcugaa

SEQ ID NO: 2293 - RNA, 20 nt, Artificial Sequence
  Synthetic
aaaauucuggaugcucugau

SEQ ID NO: 2294 - RNA, 20 nt, Artificial Sequence
  Synthetic
aaauucuggaugcucugaug

SEQ ID NO: 2295 - RNA, 20 nt, Artificial Sequence
  Synthetic
aauuuuccugucuauggaag

SEQ ID NO: 2296 - RNA, 20 nt, Artificial Sequence
  Synthetic
acaggaaaauucuggaugcu

SEQ ID NO: 2297 - RNA, 20 nt, Artificial Sequence
  Synthetic
acuuccauagacaggaaaau

SEQ ID NO: 2298 - RNA, 20 nt, Artificial Sequence
  Synthetic
agaauuuuccugucuaugga

SEQ ID NO: 2299 - RNA, 20 nt, Artificial Sequence
  Synthetic
agacaggaaaauucuggaug

SEQ ID NO: 2300 - RNA, 20 nt, Artificial Sequence
  Synthetic
agagcauccagaauuuuccu

SEQ ID NO: 2301 - RNA, 20 nt, Artificial Sequence
  Synthetic
agcaucagagcauccagaau

SEQ ID NO: 2302 - RNA, 20 nt, Artificial Sequence
  Synthetic
agcauccagaauuuuccugu

SEQ ID NO: 2303 - RNA, 20 nt, Artificial Sequence
  Synthetic
aggaaaauucuggaugcucu

SEQ ID NO: 2304 - RNA, 20 nt, Artificial Sequence
  Synthetic
aggguacuuccauagacagg

SEQ ID NO: 2305 - RNA, 20 nt, Artificial Sequence
  Synthetic
auagacaggaaaauucugga

SEQ ID NO: 2306 - RNA, 20 nt, Artificial Sequence
  Synthetic
aucagagcauccagaauuuu

SEQ ID NO: 2307 - RNA, 20 nt, Artificial Sequence
  Synthetic
auccagaauuuuccugucua

SEQ ID NO: 2308 - RNA, 20 nt, Artificial Sequence
  Synthetic
auuuuccugucuauggaagu

SEQ ID NO: 2309 - RNA, 20 nt, Artificial Sequence
  Synthetic
cagaauuuuccugucuaugg

SEQ ID NO: 2310 - RNA, 20 nt, Artificial Sequence
  Synthetic
cagagcauccagaauuuucc

SEQ ID NO: 2311 - RNA, 20 nt, Artificial Sequence
  Synthetic
cagcaucagagcauccagaa

SEQ ID NO: 2312 - RNA, 20 nt, Artificial Sequence
  Synthetic
caggaaaauucuggaugcuc

SEQ ID NO: 2313 - RNA, 20 nt, Artificial Sequence
  Synthetic
caggguacuuccauagacag

SEQ ID NO: 2314 - RNA, 20 nt, Artificial Sequence
  Synthetic
cauagacaggaaaauucugg

SEQ ID NO: 2315 - RNA, 20 nt, Artificial Sequence
  Synthetic
caucagagcauccagaauuu

SEQ ID NO: 2316 - RNA, 20 nt, Artificial Sequence
  Synthetic
cauccagaauuuuccugucu

SEQ ID NO: 2317 - RNA, 20 nt, Artificial Sequence
  Synthetic
ccagaauuuuccugucuaug

SEQ ID NO: 2318 - RNA, 20 nt, Artificial Sequence
  Synthetic
ccauagacaggaaaauucug

SEQ ID NO: 2319 - RNA, 20 nt, Artificial Sequence
  Synthetic
cuuccauagacaggaaaauu

SEQ ID NO: 2320 - RNA, 20 nt, Artificial Sequence
  Synthetic
gaaaauucuggaugcucuga

SEQ ID NO: 2321 - RNA, 20 nt, Artificial Sequence
  Synthetic
gaauuuuccugucuauggaa

SEQ ID NO: 2322 - RNA, 20 nt, Artificial Sequence
  Synthetic
gacaggaaaauucuggaugc

SEQ ID NO: 2323 - RNA, 20 nt, Artificial Sequence
  Synthetic
gagcauccagaauuuuccug

SEQ ID NO: 2324 - RNA, 20 nt, Artificial Sequence
  Synthetic
gcaucagagcauccagaauu

SEQ ID NO: 2325 - RNA, 20 nt, Artificial Sequence
  Synthetic
gcauccagaauuuuccuguc

SEQ ID NO: 2326 - RNA, 20 nt, Artificial Sequence
  Synthetic
ggaaaauucuggaugcucug

SEQ ID NO: 2327 - RNA, 20 nt, Artificial Sequence
  Synthetic
ggguacuuccauagacagga

SEQ ID NO: 2328 - RNA, 20 nt, Artificial Sequence
  Synthetic
gguacuuccauagacaggaa

SEQ ID NO: 2329 - RNA, 20 nt, Artificial Sequence
  Synthetic
guacuuccauagacaggaaa

SEQ ID NO: 2330 - RNA, 20 nt, Artificial Sequence
  Synthetic
uacuuccauagacaggaaaa

SEQ ID NO: 2331 - RNA, 20 nt, Artificial Sequence
  Synthetic
uagacaggaaaauucuggau

SEQ ID NO: 2332 - RNA, 20 nt, Artificial Sequence
  Synthetic
ucagagcauccagaauuuuc

SEQ ID NO: 2333 - RNA, 20 nt, Artificial Sequence
  Synthetic
ucagcaucagagcauccaga

SEQ ID NO: 2334 - RNA, 20 nt, Artificial Sequence
  Synthetic
uccagaauuuuccugucuau

SEQ ID NO: 2335 - RNA, 20 nt, Artificial Sequence
  Synthetic
uccauagacaggaaaauucu

SEQ ID NO: 2336 - RNA, 20 nt, Artificial Sequence
  Synthetic
uucagcaucagagcauccag

SEQ ID NO: 2337 - RNA, 20 nt, Artificial Sequence
  Synthetic
uuccauagacaggaaaauuc

SEQ ID NO: 2338 - RNA, 20 nt, Artificial Sequence
  Synthetic
uuuuccugucuauggaagua

SEQ ID NO: 2339 - RNA, 21 nt, Artificial Sequence
  Synthetic
aaaauucuggaugcucugaug

SEQ ID NO: 2340 - RNA, 21 nt, Artificial Sequence
  Synthetic
aaauucuggaugcucugaugc

SEQ ID NO: 2341 - RNA, 21 nt, Artificial Sequence
  Synthetic
aauuuuccugucuauggaagu

SEQ ID NO: 2342 - RNA, 21 nt, Artificial Sequence
  Synthetic
acaggaaaauucuggaugcuc

SEQ ID NO: 2343 - RNA, 21 nt, Artificial Sequence
  Synthetic
acuuccauagacaggaaaauu

SEQ ID NO: 2344 - RNA, 21 nt, Artificial Sequence
  Synthetic
agaauuuuccugucuauggaa

SEQ ID NO: 2345 - RNA, 21 nt, Artificial Sequence
  Synthetic
agacaggaaaauucuggaugc

SEQ ID NO: 2346 - RNA, 21 nt, Artificial Sequence
  Synthetic
agagcauccagaauuuuccug

SEQ ID NO: 2347 - RNA, 21 nt, Artificial Sequence
  Synthetic
agcaucagagcauccagaauu

SEQ ID NO: 2348 - RNA, 21 nt, Artificial Sequence
  Synthetic
agcauccagaauuuuccuguc

SEQ ID NO: 2349 - RNA, 21 nt, Artificial Sequence
  Synthetic
aggaaaauucuggaugcucug

SEQ ID NO: 2350 - RNA, 21 nt, Artificial Sequence
  Synthetic
aggguacuuccauagacagga

SEQ ID NO: 2351 - RNA, 21 nt, Artificial Sequence
  Synthetic
auagacaggaaaauucuggau

SEQ ID NO: 2352 - RNA, 21 nt, Artificial Sequence
  Synthetic
aucagagcauccagaauuuuc

SEQ ID NO: 2353 - RNA, 21 nt, Artificial Sequence
  Synthetic
auccagaauuuuccugucuau

SEQ ID NO: 2354 - RNA, 21 nt, Artificial Sequence
  Synthetic
auuuuccugucuauggaagua

SEQ ID NO: 2355 - RNA, 21 nt, Artificial Sequence
  Synthetic
cagaauuuuccugucuaugga

SEQ ID NO: 2356 - RNA, 21 nt, Artificial Sequence
  Synthetic
cagagcauccagaauuuuccu

SEQ ID NO: 2357 - RNA, 21 nt, Artificial Sequence
  Synthetic
cagcaucagagcauccagaau

SEQ ID NO: 2358 - RNA, 21 nt, Artificial Sequence
  Synthetic
caggaaaauucuggaugcucu

SEQ ID NO: 2359 - RNA, 21 nt, Artificial Sequence
  Synthetic
caggguacuuccauagacagg

SEQ ID NO: 2360 - RNA, 21 nt, Artificial Sequence
  Synthetic
cauagacaggaaaauucugga

SEQ ID NO: 2361 - RNA, 21 nt, Artificial Sequence
  Synthetic
caucagagcauccagaauuuu

SEQ ID NO: 2362 - RNA, 21 nt, Artificial Sequence
  Synthetic
cauccagaauuuuccugucua

SEQ ID NO: 2363 - RNA, 21 nt, Artificial Sequence
  Synthetic
ccagaauuuuccugucuaugg

SEQ ID NO: 2364 - RNA, 21 nt, Artificial Sequence
  Synthetic
ccauagacaggaaaauucugg

SEQ ID NO: 2365 - RNA, 21 nt, Artificial Sequence
  Synthetic
cuuccauagacaggaaaauuc

SEQ ID NO: 2366 - RNA, 21 nt, Artificial Sequence
  Synthetic
gaaaauucuggaugcucugau

SEQ ID NO: 2367 - RNA, 21 nt, Artificial Sequence
  Synthetic
gaauuuuccugucuauggaag

SEQ ID NO: 2368 - RNA, 21 nt, Artificial Sequence
  Synthetic
gacaggaaaauucuggaugcu

SEQ ID NO: 2369 - RNA, 21 nt, Artificial Sequence
  Synthetic
gagcauccagaauuuuccugu

SEQ ID NO: 2370 - RNA, 21 nt, Artificial Sequence
  Synthetic
gcaggguacuuccauagacag

SEQ ID NO: 2371 - RNA, 21 nt, Artificial Sequence
  Synthetic
gcaucagagcauccagaauuu

SEQ ID NO: 2372 - RNA, 21 nt, Artificial Sequence
  Synthetic
gcauccagaauuuuccugucu

SEQ ID NO: 2373 - RNA, 21 nt, Artificial Sequence
  Synthetic
ggaaaauucuggaugcucuga

SEQ ID NO: 2374 - RNA, 21 nt, Artificial Sequence
  Synthetic
ggguacuuccauagacaggaa

SEQ ID NO: 2375 - RNA, 21 nt, Artificial Sequence
  Synthetic
gguacuuccauagacaggaaa

SEQ ID NO: 2376 - RNA, 21 nt, Artificial Sequence
  Synthetic
guacuuccauagacaggaaaa

SEQ ID NO: 2377 - RNA, 21 nt, Artificial Sequence
  Synthetic
guucagcaucagagcauccag

SEQ ID NO: 2378 - RNA, 21 nt, Artificial Sequence
  Synthetic
uacuuccauagacaggaaaau

SEQ ID NO: 2379 - RNA, 21 nt, Artificial Sequence
  Synthetic
uagacaggaaaauucuggaug

SEQ ID NO: 2380 - RNA, 21 nt, Artificial Sequence
  Synthetic
ucagagcauccagaauuuucc

SEQ ID NO: 2381 - RNA, 21 nt, Artificial Sequence
  Synthetic
ucagcaucagagcauccagaa

SEQ ID NO: 2382 - RNA, 21 nt, Artificial Sequence
  Synthetic
uccagaauuuuccugucuaug

SEQ ID NO: 2383 - RNA, 21 nt, Artificial Sequence
  Synthetic
uccauagacaggaaaauucug

SEQ ID NO: 2384 - RNA, 21 nt, Artificial Sequence
  Synthetic
uucagcaucagagcauccaga

SEQ ID NO: 2385 - RNA, 21 nt, Artificial Sequence
  Synthetic
uuccauagacaggaaaauucu

SEQ ID NO: 2386 - RNA, 21 nt, Artificial Sequence
  Synthetic
uuuuccugucuauggaaguac

SEQ ID NO: 2387 - RNA, 22 nt, Artificial Sequence
  Synthetic
aaaauucuggaugcucugaugc

SEQ ID NO: 2388 - RNA, 22 nt, Artificial Sequence
  Synthetic
aaauucuggaugcucugaugcu

SEQ ID NO: 2389 - RNA, 22 nt, Artificial Sequence
  Synthetic
aauuuuccugucuauggaagua

SEQ ID NO: 2390 - RNA, 22 nt, Artificial Sequence
  Synthetic
acaggaaaauucuggaugcucu

SEQ ID NO: 2391 - RNA, 22 nt, Artificial Sequence
  Synthetic
acuuccauagacaggaaaauuc

SEQ ID NO: 2392 - RNA, 22 nt, Artificial Sequence
  Synthetic
agaauuuuccugucuauggaag

SEQ ID NO: 2393 - RNA, 22 nt, Artificial Sequence
  Synthetic
agacaggaaaauucuggaugcu

SEQ ID NO: 2394 - RNA, 22 nt, Artificial Sequence
  Synthetic
agagcauccagaauuuuccugu

SEQ ID NO: 2395 - RNA, 22 nt, Artificial Sequence
  Synthetic
agcaucagagcauccagaauuu

SEQ ID NO: 2396 - RNA, 22 nt, Artificial Sequence
  Synthetic
agcauccagaauuuuccugucu

SEQ ID NO: 2397 - RNA, 22 nt, Artificial Sequence
  Synthetic
aggaaaauucuggaugcucuga

SEQ ID NO: 2398 - RNA, 22 nt, Artificial Sequence
  Synthetic
aggguacuuccauagacaggaa

SEQ ID NO: 2399 - RNA, 22 nt, Artificial Sequence
  Synthetic
auagacaggaaaauucuggaug

SEQ ID NO: 2400 - RNA, 22 nt, Artificial Sequence
  Synthetic
aucagagcauccagaauuuucc

SEQ ID NO: 2401 - RNA, 22 nt, Artificial Sequence
  Synthetic
auccagaauuuuccugucuaug

SEQ ID NO: 2402 - RNA, 22 nt, Artificial Sequence
  Synthetic
auuuuccugucuauggaaguac

SEQ ID NO: 2403 - RNA, 22 nt, Artificial Sequence
  Synthetic
cagaauuuuccugucuauggaa

SEQ ID NO: 2404 - RNA, 22 nt, Artificial Sequence
  Synthetic
cagagcauccagaauuuuccug

SEQ ID NO: 2405 - RNA, 22 nt, Artificial Sequence
  Synthetic
cagcaucagagcauccagaauu

SEQ ID NO: 2406 - RNA, 22 nt, Artificial Sequence
  Synthetic
caggaaaauucuggaugcucug

SEQ ID NO: 2407 - RNA, 22 nt, Artificial Sequence
  Synthetic
caggguacuuccauagacagga

SEQ ID NO: 2408 - RNA, 22 nt, Artificial Sequence
  Synthetic
cauagacaggaaaauucuggau

SEQ ID NO: 2409 - RNA, 22 nt, Artificial Sequence
  Synthetic
caucagagcauccagaauuuuc

SEQ ID NO: 2410 - RNA, 22 nt, Artificial Sequence
  Synthetic
cauccagaauuuuccugucuau

SEQ ID NO: 2411 - RNA, 22 nt, Artificial Sequence
  Synthetic
ccagaauuuuccugucuaugga

SEQ ID NO: 2412 - RNA, 22 nt, Artificial Sequence
  Synthetic
ccauagacaggaaaauucugga

SEQ ID NO: 2413 - RNA, 22 nt, Artificial Sequence
  Synthetic
cuuccauagacaggaaaauucu

SEQ ID NO: 2414 - RNA, 22 nt, Artificial Sequence
  Synthetic
gaaaauucuggaugcucugaug

SEQ ID NO: 2415 - RNA, 22 nt, Artificial Sequence
  Synthetic
gaauuuuccugucuauggaagu

SEQ ID NO: 2416 - RNA, 22 nt, Artificial Sequence
  Synthetic
gacaggaaaauucuggaugcuc

SEQ ID NO: 2417 - RNA, 22 nt, Artificial Sequence
  Synthetic
gagcauccagaauuuuccuguc

SEQ ID NO: 2418 - RNA, 22 nt, Artificial Sequence
  Synthetic
gcaggguacuuccauagacagg

SEQ ID NO: 2419 - RNA, 22 nt, Artificial Sequence
  Synthetic
gcaucagagcauccagaauuuu

SEQ ID NO: 2420 - RNA, 22 nt, Artificial Sequence
  Synthetic
gcauccagaauuuuccugucua

SEQ ID NO: 2421 - RNA, 22 nt, Artificial Sequence
  Synthetic
ggaaaauucuggaugcucugau

SEQ ID NO: 2422 - RNA, 22 nt, Artificial Sequence
  Synthetic
ggcaggguacuuccauagacag

SEQ ID NO: 2423 - RNA, 22 nt, Artificial Sequence
  Synthetic
ggguacuuccauagacaggaaa

SEQ ID NO: 2424 - RNA, 22 nt, Artificial Sequence
  Synthetic
gguacuuccauagacaggaaaa

SEQ ID NO: 2425 - RNA, 22 nt, Artificial Sequence
  Synthetic
guacuuccauagacaggaaaau

SEQ ID NO: 2426 - RNA, 22 nt, Artificial Sequence
  Synthetic
guucagcaucagagcauccaga

SEQ ID NO: 2427 - RNA, 22 nt, Artificial Sequence
  Synthetic
uacuuccauagacaggaaaauu

SEQ ID NO: 2428 - RNA, 22 nt, Artificial Sequence
  Synthetic
uagacaggaaaauucuggaugc

SEQ ID NO: 2429 - RNA, 22 nt, Artificial Sequence
  Synthetic
ucagagcauccagaauuuuccu

SEQ ID NO: 2430 - RNA, 22 nt, Artificial Sequence
  Synthetic
ucagcaucagagcauccagaau

SEQ ID NO: 2431 - RNA, 22 nt, Artificial Sequence
  Synthetic
uccagaauuuuccugucuaugg

SEQ ID NO: 2432 - RNA, 22 nt, Artificial Sequence
  Synthetic
uccauagacaggaaaauucugg

SEQ ID NO: 2433 - RNA, 22 nt, Artificial Sequence
  Synthetic
uguucagcaucagagcauccag

SEQ ID NO: 2434 - RNA, 22 nt, Artificial Sequence
  Synthetic
uucagcaucagagcauccagaa

SEQ ID NO: 2435 - RNA, 22 nt, Artificial Sequence
  Synthetic
uuccauagacaggaaaauucug

SEQ ID NO: 2436 - RNA, 22 nt, Artificial Sequence
  Synthetic
uuuuccugucuauggaaguacc

SEQ ID NO: 2437 - RNA, 20 nt, Artificial Sequence
  Synthetic
aacaucuugacguacuauua

SEQ ID NO: 2438 - RNA, 20 nt, Artificial Sequence
  Synthetic
aauaguacgucaagauguua

SEQ ID NO: 2439 - RNA, 20 nt, Artificial Sequence
  Synthetic
aauuuauauauuuaauagua

SEQ ID NO: 2440 - RNA, 20 nt, Artificial Sequence
  Synthetic
acaucuugacguacuauuaa

SEQ ID NO: 2441 - RNA, 20 nt, Artificial Sequence
  Synthetic
acguacuauuaaauauauaa

SEQ ID NO: 2442 - RNA, 20 nt, Artificial Sequence
  Synthetic
acgucaagauguuaucacuc

SEQ ID NO: 2443 - RNA, 20 nt, Artificial Sequence
  Synthetic
agcgagugauaacaucuuga

SEQ ID NO: 2444 - RNA, 20 nt, Artificial Sequence
  Synthetic
aguacgucaagauguuauca

SEQ ID NO: 2445 - RNA, 20 nt, Artificial Sequence
  Synthetic
agugauaacaucuugacgua

SEQ ID NO: 2446 - RNA, 20 nt, Artificial Sequence
  Synthetic
auaacaucuugacguacuau

SEQ ID NO: 2447 - RNA, 20 nt, Artificial Sequence
  Synthetic
auaguacgucaagauguuau

SEQ ID NO: 2448 - RNA, 20 nt, Artificial Sequence
  Synthetic
auauauuuaauaguacguca

SEQ ID NO: 2449 - RNA, 20 nt, Artificial Sequence
  Synthetic
auauuuaauaguacgucaag

SEQ ID NO: 2450 - RNA, 20 nt, Artificial Sequence
  Synthetic
aucuugacguacuauuaaau

SEQ ID NO: 2451 - RNA, 20 nt, Artificial Sequence
  Synthetic
auuuaauaguacgucaagau

SEQ ID NO: 2452 - RNA, 20 nt, Artificial Sequence
  Synthetic
auuuauauauuuaauaguac

SEQ ID NO: 2453 - RNA, 20 nt, Artificial Sequence
  Synthetic
caucuugacguacuauuaaa

SEQ ID NO: 2454 - RNA, 20 nt, Artificial Sequence
  Synthetic
cgagugauaacaucuugacg

SEQ ID NO: 2455 - RNA, 20 nt, Artificial Sequence
  Synthetic
cguacuauuaaauauauaaa

SEQ ID NO: 2456 - RNA, 20 nt, Artificial Sequence
  Synthetic
cuagcgagugauaacaucuu

SEQ ID NO: 2457 - RNA, 20 nt, Artificial Sequence
  Synthetic
cuugacguacuauuaaauau

SEQ ID NO: 2458 - RNA, 20 nt, Artificial Sequence
  Synthetic
gacguacuauuaaauauaua

SEQ ID NO: 2459 - RNA, 20 nt, Artificial Sequence
  Synthetic
gagugauaacaucuugacgu

SEQ ID NO: 2460 - RNA, 20 nt, Artificial Sequence
  Synthetic
gauaacaucuugacguacua

SEQ ID NO: 2461 - RNA, 20 nt, Artificial Sequence
  Synthetic
gcgagugauaacaucuugac

SEQ ID NO: 2462 - RNA, 20 nt, Artificial Sequence
  Synthetic
guacgucaagauguuaucac

SEQ ID NO: 2463 - RNA, 20 nt, Artificial Sequence
  Synthetic
gugauaacaucuugacguac

SEQ ID NO: 2464 - RNA, 20 nt, Artificial Sequence
  Synthetic
uaacaucuugacguacuauu

SEQ ID NO: 2465 - RNA, 20 nt, Artificial Sequence
  Synthetic
uaauaguacgucaagauguu

SEQ ID NO: 2466 - RNA, 20 nt, Artificial Sequence
  Synthetic
uaauuuauauauuuaauagu

SEQ ID NO: 2467 - RNA, 20 nt, Artificial Sequence
  Synthetic
uacgucaagauguuaucacu

SEQ ID NO: 2468 - RNA, 20 nt, Artificial Sequence
  Synthetic
uagcgagugauaacaucuug

SEQ ID NO: 2469 - RNA, 20 nt, Artificial Sequence
  Synthetic
uaguacgucaagauguuauc

SEQ ID NO: 2470 - RNA, 20 nt, Artificial Sequence
  Synthetic
uauauauuuaauaguacguc

SEQ ID NO: 2471 - RNA, 20 nt, Artificial Sequence
  Synthetic
uauauuuaauaguacgucaa

SEQ ID NO: 2472 - RNA, 20 nt, Artificial Sequence
  Synthetic
uauuuaauaguacgucaaga

SEQ ID NO: 2473 - RNA, 20 nt, Artificial Sequence
  Synthetic
ucuugacguacuauuaaaua

SEQ ID NO: 2474 - RNA, 20 nt, Artificial Sequence
  Synthetic
ugacguacuauuaaauauau

SEQ ID NO: 2475 - RNA, 20 nt, Artificial Sequence
  Synthetic
ugauaacaucuugacguacu

SEQ ID NO: 2476 - RNA, 20 nt, Artificial Sequence
  Synthetic
uuaauaguacgucaagaugu

SEQ ID NO: 2477 - RNA, 20 nt, Artificial Sequence
  Synthetic
uuaauuuauauauuuaauag

SEQ ID NO: 2478 - RNA, 20 nt, Artificial Sequence
  Synthetic
uuauauauuuaauaguacgu

SEQ ID NO: 2479 - RNA, 20 nt, Artificial Sequence
  Synthetic
uugacguacuauuaaauaua

SEQ ID NO: 2480 - RNA, 20 nt, Artificial Sequence
  Synthetic
uuuaauaguacgucaagaug

SEQ ID NO: 2481 - RNA, 20 nt, Artificial Sequence
  Synthetic
uuuaauuuauauauuuaaua

SEQ ID NO: 2482 - RNA, 20 nt, Artificial Sequence
  Synthetic
uuuauauauuuaauaguacg

SEQ ID NO: 2483 - RNA, 21 nt, Artificial Sequence
  Synthetic
aacaucuugacguacuauuaa

SEQ ID NO: 2484 - RNA, 21 nt, Artificial Sequence
  Synthetic
aauaguacgucaagauguuau

SEQ ID NO: 2485 - RNA, 21 nt, Artificial Sequence
  Synthetic
aauuuauauauuuaauaguac

SEQ ID NO: 2486 - RNA, 21 nt, Artificial Sequence
  Synthetic
acaucuugacguacuauuaaa

SEQ ID NO: 2487 - RNA, 21 nt, Artificial Sequence
  Synthetic
acguacuauuaaauauauaaa

SEQ ID NO: 2488 - RNA, 21 nt, Artificial Sequence
  Synthetic
acgucaagauguuaucacucg

SEQ ID NO: 2489 - RNA, 21 nt, Artificial Sequence
  Synthetic
agcgagugauaacaucuugac

SEQ ID NO: 2490 - RNA, 21 nt, Artificial Sequence
  Synthetic
aguacgucaagauguuaucac

SEQ ID NO: 2491 - RNA, 21 nt, Artificial Sequence
  Synthetic
agugauaacaucuugacguac

SEQ ID NO: 2492 - RNA, 21 nt, Artificial Sequence
  Synthetic
auaacaucuugacguacuauu

SEQ ID NO: 2493 - RNA, 21 nt, Artificial Sequence
  Synthetic
auaguacgucaagauguuauc

SEQ ID NO: 2494 - RNA, 21 nt, Artificial Sequence
  Synthetic
auauauuuaauaguacgucaa

SEQ ID NO: 2495 - RNA, 21 nt, Artificial Sequence
  Synthetic
auauuuaauaguacgucaaga

SEQ ID NO: 2496 - RNA, 21 nt, Artificial Sequence
  Synthetic
aucuugacguacuauuaaaua

SEQ ID NO: 2497 - RNA, 21 nt, Artificial Sequence
  Synthetic
auuuaauaguacgucaagaug

SEQ ID NO: 2498 - RNA, 21 nt, Artificial Sequence
  Synthetic
auuuauauauuuaauaguacg

SEQ ID NO: 2499 - RNA, 21 nt, Artificial Sequence
  Synthetic
caucuugacguacuauuaaau

SEQ ID NO: 2500 - RNA, 21 nt, Artificial Sequence
  Synthetic
cgagugauaacaucuugacgu

SEQ ID NO: 2501 - RNA, 21 nt, Artificial Sequence
  Synthetic
cguacuauuaaauauauaaau

SEQ ID NO: 2502 - RNA, 21 nt, Artificial Sequence
  Synthetic
cuagcgagugauaacaucuug

SEQ ID NO: 2503 - RNA, 21 nt, Artificial Sequence
  Synthetic
cuugacguacuauuaaauaua

SEQ ID NO: 2504 - RNA, 21 nt, Artificial Sequence
  Synthetic
cuuuaauuuauauauuuaaua

SEQ ID NO: 2505 - RNA, 21 nt, Artificial Sequence
  Synthetic
gacguacuauuaaauauauaa

SEQ ID NO: 2506 - RNA, 21 nt, Artificial Sequence
  Synthetic
gagugauaacaucuugacgua

SEQ ID NO: 2507 - RNA, 21 nt, Artificial Sequence
  Synthetic
gauaacaucuugacguacuau

SEQ ID NO: 2508 - RNA, 21 nt, Artificial Sequence
  Synthetic
gcgagugauaacaucuugacg

SEQ ID NO: 2509 - RNA, 21 nt, Artificial Sequence
  Synthetic
guacgucaagauguuaucacu

SEQ ID NO: 2510 - RNA, 21 nt, Artificial Sequence
  Synthetic
gugauaacaucuugacguacu

SEQ ID NO: 2511 - RNA, 21 nt, Artificial Sequence
  Synthetic
uaacaucuugacguacuauua

SEQ ID NO: 2512 - RNA, 21 nt, Artificial Sequence
  Synthetic
uaauaguacgucaagauguua

SEQ ID NO: 2513 - RNA, 21 nt, Artificial Sequence
  Synthetic
uaauuuauauauuuaauagua

SEQ ID NO: 2514 - RNA, 21 nt, Artificial Sequence
  Synthetic
uacgucaagauguuaucacuc

SEQ ID NO: 2515 - RNA, 21 nt, Artificial Sequence
  Synthetic
uagcgagugauaacaucuuga

SEQ ID NO: 2516 - RNA, 21 nt, Artificial Sequence
  Synthetic
uaguacgucaagauguuauca

SEQ ID NO: 2517 - RNA, 21 nt, Artificial Sequence
  Synthetic
uauauauuuaauaguacguca

SEQ ID NO: 2518 - RNA, 21 nt, Artificial Sequence
  Synthetic
uauauuuaauaguacgucaag

SEQ ID NO: 2519 - RNA, 21 nt, Artificial Sequence
  Synthetic
uauuuaauaguacgucaagau

SEQ ID NO: 2520 - RNA, 21 nt, Artificial Sequence
  Synthetic
ucuagcgagugauaacaucuu

SEQ ID NO: 2521 - RNA, 21 nt, Artificial Sequence
  Synthetic
ucuugacguacuauuaaauau

SEQ ID NO: 2522 - RNA, 21 nt, Artificial Sequence
  Synthetic
ugacguacuauuaaauauaua

SEQ ID NO: 2523 - RNA, 21 nt, Artificial Sequence
  Synthetic
ugauaacaucuugacguacua

SEQ ID NO: 2524 - RNA, 21 nt, Artificial Sequence
  Synthetic
uuaauaguacgucaagauguu

SEQ ID NO: 2525 - RNA, 21 nt, Artificial Sequence
  Synthetic
uuaauuuauauauuuaauagu

SEQ ID NO: 2526 - RNA, 21 nt, Artificial Sequence
  Synthetic
uuauauauuuaauaguacguc

SEQ ID NO: 2527 - RNA, 21 nt, Artificial Sequence
  Synthetic
uugacguacuauuaaauauau

SEQ ID NO: 2528 - RNA, 21 nt, Artificial Sequence
  Synthetic
uuuaauaguacgucaagaugu

SEQ ID NO: 2529 - RNA, 21 nt, Artificial Sequence
  Synthetic
uuuaauuuauauauuuaauag

SEQ ID NO: 2530 - RNA, 21 nt, Artificial Sequence
  Synthetic
uuuauauauuuaauaguacgu

SEQ ID NO: 2531 - RNA, 22 nt, Artificial Sequence
  Synthetic
aacaucuugacguacuauuaaa

SEQ ID NO: 2532 - RNA, 22 nt, Artificial Sequence
  Synthetic
aauaguacgucaagauguuauc

SEQ ID NO: 2533 - RNA, 22 nt, Artificial Sequence
  Synthetic
aauuuauauauuuaauaguacg

SEQ ID NO: 2534 - RNA, 22 nt, Artificial Sequence
  Synthetic
acaucuugacguacuauuaaau

SEQ ID NO: 2535 - RNA, 22 nt, Artificial Sequence
  Synthetic
acguacuauuaaauauauaaau

SEQ ID NO: 2536 - RNA, 22 nt, Artificial Sequence
  Synthetic
acgucaagauguuaucacucgc

SEQ ID NO: 2537 - RNA, 22 nt, Artificial Sequence
  Synthetic
acuuuaauuuauauauuuaaua

SEQ ID NO: 2538 - RNA, 22 nt, Artificial Sequence
  Synthetic
agcgagugauaacaucuugacg

SEQ ID NO: 2539 - RNA, 22 nt, Artificial Sequence
  Synthetic
aguacgucaagauguuaucacu

SEQ ID NO: 2540 - RNA, 22 nt, Artificial Sequence
  Synthetic
agugauaacaucuugacguacu

SEQ ID NO: 2541 - RNA, 22 nt, Artificial Sequence
  Synthetic
auaacaucuugacguacuauua

SEQ ID NO: 2542 - RNA, 22 nt, Artificial Sequence
  Synthetic
auaguacgucaagauguuauca

SEQ ID NO: 2543 - RNA, 22 nt, Artificial Sequence
  Synthetic
auauauuuaauaguacgucaag

SEQ ID NO: 2544 - RNA, 22 nt, Artificial Sequence
  Synthetic
auauuuaauaguacgucaagau

SEQ ID NO: 2545 - RNA, 22 nt, Artificial Sequence
  Synthetic
aucuagcgagugauaacaucuu

SEQ ID NO: 2546 - RNA, 22 nt, Artificial Sequence
  Synthetic
aucuugacguacuauuaaauau

SEQ ID NO: 2547 - RNA, 22 nt, Artificial Sequence
  Synthetic
auuuaauaguacgucaagaugu

SEQ ID NO: 2548 - RNA, 22 nt, Artificial Sequence
  Synthetic
auuuauauauuuaauaguacgu

SEQ ID NO: 2549 - RNA, 22 nt, Artificial Sequence
  Synthetic
caucuugacguacuauuaaaua

SEQ ID NO: 2550 - RNA, 22 nt, Artificial Sequence
  Synthetic
cgagugauaacaucuugacgua

SEQ ID NO: 2551 - RNA, 22 nt, Artificial Sequence
  Synthetic
cguacuauuaaauauauaaauu

SEQ ID NO: 2552 - RNA, 22 nt, Artificial Sequence
  Synthetic
cuagcgagugauaacaucuuga

SEQ ID NO: 2553 - RNA, 22 nt, Artificial Sequence
  Synthetic
cuugacguacuauuaaauauau

SEQ ID NO: 2554 - RNA, 22 nt, Artificial Sequence
  Synthetic
cuuuaauuuauauauuuaauag

SEQ ID NO: 2555 - RNA, 22 nt, Artificial Sequence
  Synthetic
gacguacuauuaaauauauaaa

SEQ ID NO: 2556 - RNA, 22 nt, Artificial Sequence
  Synthetic
gagugauaacaucuugacguac

SEQ ID NO: 2557 - RNA, 22 nt, Artificial Sequence
  Synthetic
gauaacaucuugacguacuauu

SEQ ID NO: 2558 - RNA, 22 nt, Artificial Sequence
  Synthetic
gcgagugauaacaucuugacgu

SEQ ID NO: 2559 - RNA, 22 nt, Artificial Sequence
  Synthetic
guacgucaagauguuaucacuc

SEQ ID NO: 2560 - RNA, 22 nt, Artificial Sequence
  Synthetic
gugauaacaucuugacguacua

SEQ ID NO: 2561 - RNA, 22 nt, Artificial Sequence
  Synthetic
uaacaucuugacguacuauuaa

SEQ ID NO: 2562 - RNA, 22 nt, Artificial Sequence
  Synthetic
uaauaguacgucaagauguuau

SEQ ID NO: 2563 - RNA, 22 nt, Artificial Sequence
  Synthetic
uaauuuauauauuuaauaguac

SEQ ID NO: 2564 - RNA, 22 nt, Artificial Sequence
  Synthetic
uacgucaagauguuaucacucg

SEQ ID NO: 2565 - RNA, 22 nt, Artificial Sequence
  Synthetic
uagcgagugauaacaucuugac

SEQ ID NO: 2566 - RNA, 22 nt, Artificial Sequence
  Synthetic
uaguacgucaagauguuaucac

SEQ ID NO: 2567 - RNA, 22 nt, Artificial Sequence
  Synthetic
uauauauuuaauaguacgucaa

SEQ ID NO: 2568 - RNA, 22 nt, Artificial Sequence
  Synthetic
uauauuuaauaguacgucaaga

SEQ ID NO: 2569 - RNA, 22 nt, Artificial Sequence
  Synthetic
uauuuaauaguacgucaagaug

SEQ ID NO: 2570 - RNA, 22 nt, Artificial Sequence
  Synthetic
ucuagcgagugauaacaucuug

SEQ ID NO: 2571 - RNA, 22 nt, Artificial Sequence
  Synthetic
ucuugacguacuauuaaauaua

SEQ ID NO: 2572 - RNA, 22 nt, Artificial Sequence
  Synthetic
ugacguacuauuaaauauauaa

SEQ ID NO: 2573 - RNA, 22 nt, Artificial Sequence
  Synthetic
ugauaacaucuugacguacuau

SEQ ID NO: 2574 - RNA, 22 nt, Artificial Sequence
  Synthetic
uuaauaguacgucaagauguua

SEQ ID NO: 2575 - RNA, 22 nt, Artificial Sequence
  Synthetic
uuaauuuauauauuuaauagua

SEQ ID NO: 2576 - RNA, 22 nt, Artificial Sequence
  Synthetic
uuauauauuuaauaguacguca

SEQ ID NO: 2577 - RNA, 22 nt, Artificial Sequence
  Synthetic
uugacguacuauuaaauauaua

SEQ ID NO: 2578 - RNA, 22 nt, Artificial Sequence
  Synthetic
uuuaauaguacgucaagauguu

SEQ ID NO: 2579 - RNA, 22 nt, Artificial Sequence
  Synthetic
uuuaauuuauauauuuaauagu

SEQ ID NO: 2580 - RNA, 22 nt, Artificial Sequence
  Synthetic
uuuauauauuuaauaguacguc

SEQ ID NO: 2581 - RNA, 20 nt, Artificial Sequence
  Synthetic
aagcaggugagccugcggga

SEQ ID NO: 2582 - RNA, 20 nt, Artificial Sequence
  Synthetic
accugcuucuccggcgugga

SEQ ID NO: 2583 - RNA, 20 nt, Artificial Sequence
  Synthetic
acgccggagaagcaggugag

SEQ ID NO: 2584 - RNA, 20 nt, Artificial Sequence
  Synthetic
acuucuuccacgccggagaa

SEQ ID NO: 2585 - RNA, 20 nt, Artificial Sequence
  Synthetic
agaagcaggugagccugcgg

SEQ ID NO: 2586 - RNA, 20 nt, Artificial Sequence
  Synthetic
agcaggugagccugcgggau

SEQ ID NO: 2587 - RNA, 20 nt, Artificial Sequence
  Synthetic
aggcucaccugcuucuccgg

SEQ ID NO: 2588 - RNA, 20 nt, Artificial Sequence
  Synthetic
aucccgcaggcucaccugcu

SEQ ID NO: 2589 - RNA, 20 nt, Artificial Sequence
  Synthetic
caccugcuucuccggcgugg

SEQ ID NO: 2590 - RNA, 20 nt, Artificial Sequence
  Synthetic
cacgccggagaagcagguga

SEQ ID NO: 2591 - RNA, 20 nt, Artificial Sequence
  Synthetic
caggcucaccugcuucuccg

SEQ ID NO: 2592 - RNA, 20 nt, Artificial Sequence
  Synthetic
caucccgcaggcucaccugc

SEQ ID NO: 2593 - RNA, 20 nt, Artificial Sequence
  Synthetic
ccacgccggagaagcaggug

SEQ ID NO: 2594 - RNA, 20 nt, Artificial Sequence
  Synthetic
cccgcaggcucaccugcuuc

SEQ ID NO: 2595 - RNA, 20 nt, Artificial Sequence
  Synthetic
ccgcaggcucaccugcuucu

SEQ ID NO: 2596 - RNA, 20 nt, Artificial Sequence
  Synthetic
ccggagaagcaggugagccu

SEQ ID NO: 2597 - RNA, 20 nt, Artificial Sequence
  Synthetic
ccugcuucuccggcguggaa

SEQ ID NO: 2598 - RNA, 20 nt, Artificial Sequence
  Synthetic
cgcaggcucaccugcuucuc

SEQ ID NO: 2599 - RNA, 20 nt, Artificial Sequence
  Synthetic
cgcaucccgcaggcucaccu

SEQ ID NO: 2600 - RNA, 20 nt, Artificial Sequence
  Synthetic
cgccggagaagcaggugagc

SEQ ID NO: 2601 - RNA, 20 nt, Artificial Sequence
  Synthetic
cggagaagcaggugagccug

SEQ ID NO: 2602 - RNA, 20 nt, Artificial Sequence
  Synthetic
cucaccugcuucuccggcgu

SEQ ID NO: 2603 - RNA, 20 nt, Artificial Sequence
  Synthetic
cucgcaucccgcaggcucac

SEQ ID NO: 2604 - RNA, 20 nt, Artificial Sequence
  Synthetic
cugcuucuccggcguggaag

SEQ ID NO: 2605 - RNA, 20 nt, Artificial Sequence
  Synthetic
cuuacuucuuccacgccgga

SEQ ID NO: 2606 - RNA, 20 nt, Artificial Sequence
  Synthetic
cuuccacgccggagaagcag

SEQ ID NO: 2607 - RNA, 20 nt, Artificial Sequence
  Synthetic
cuucuuccacgccggagaag

SEQ ID NO: 2608 - RNA, 20 nt, Artificial Sequence
  Synthetic
gaagcaggugagccugcggg

SEQ ID NO: 2609 - RNA, 20 nt, Artificial Sequence
  Synthetic
gagaagcaggugagccugcg

SEQ ID NO: 2610 - RNA, 20 nt, Artificial Sequence
  Synthetic
gcaggcucaccugcuucucc

SEQ ID NO: 2611 - RNA, 20 nt, Artificial Sequence
  Synthetic
gcaucccgcaggcucaccug

SEQ ID NO: 2612 - RNA, 20 nt, Artificial Sequence
  Synthetic
gccggagaagcaggugagcc

SEQ ID NO: 2613 - RNA, 20 nt, Artificial Sequence
  Synthetic
gcucaccugcuucuccggcg

SEQ ID NO: 2614 - RNA, 20 nt, Artificial Sequence
  Synthetic
gcuucuccggcguggaagaa

SEQ ID NO: 2615 - RNA, 20 nt, Artificial Sequence
  Synthetic
ggagaagcaggugagccugc

SEQ ID NO: 2616 - RNA, 20 nt, Artificial Sequence
  Synthetic
ggcucaccugcuucuccggc

SEQ ID NO: 2617 - RNA, 20 nt, Artificial Sequence
  Synthetic
uacuucuuccacgccggaga

SEQ ID NO: 2618 - RNA, 20 nt, Artificial Sequence
  Synthetic
ucaccugcuucuccggcgug

SEQ ID NO: 2619 - RNA, 20 nt, Artificial Sequence
  Synthetic
uccacgccggagaagcaggu

SEQ ID NO: 2620 - RNA, 20 nt, Artificial Sequence
  Synthetic
ucccgcaggcucaccugcuu

SEQ ID NO: 2621 - RNA, 20 nt, Artificial Sequence
  Synthetic
ucgcaucccgcaggcucacc

SEQ ID NO: 2622 - RNA, 20 nt, Artificial Sequence
  Synthetic
ucuuccacgccggagaagca

SEQ ID NO: 2623 - RNA, 20 nt, Artificial Sequence
  Synthetic
ugcuucuccggcguggaaga

SEQ ID NO: 2624 - RNA, 20 nt, Artificial Sequence
  Synthetic
uuacuucuuccacgccggag

SEQ ID NO: 2625 - RNA, 20 nt, Artificial Sequence
  Synthetic
uuccacgccggagaagcagg

SEQ ID NO: 2626 - RNA, 20 nt, Artificial Sequence
  Synthetic
uucuuccacgccggagaagc

SEQ ID NO: 2627 - RNA, 21 nt, Artificial Sequence
  Synthetic
aagcaggugagccugcgggau

SEQ ID NO: 2628 - RNA, 21 nt, Artificial Sequence
  Synthetic
accugcuucuccggcguggaa

SEQ ID NO: 2629 - RNA, 21 nt, Artificial Sequence
  Synthetic
acgccggagaagcaggugagc

SEQ ID NO: 2630 - RNA, 21 nt, Artificial Sequence
  Synthetic
acuucuuccacgccggagaag

SEQ ID NO: 2631 - RNA, 21 nt, Artificial Sequence
  Synthetic
agaagcaggugagccugcggg

SEQ ID NO: 2632 - RNA, 21 nt, Artificial Sequence
  Synthetic
agcaggugagccugcgggaug

SEQ ID NO: 2633 - RNA, 21 nt, Artificial Sequence
  Synthetic
aggcucaccugcuucuccggc

SEQ ID NO: 2634 - RNA, 21 nt, Artificial Sequence
  Synthetic
aucccgcaggcucaccugcuu

SEQ ID NO: 2635 - RNA, 21 nt, Artificial Sequence
  Synthetic
caccugcuucuccggcgugga

SEQ ID NO: 2636 - RNA, 21 nt, Artificial Sequence
  Synthetic
cacgccggagaagcaggugag

SEQ ID NO: 2637 - RNA, 21 nt, Artificial Sequence
  Synthetic
caggcucaccugcuucuccgg

SEQ ID NO: 2638 - RNA, 21 nt, Artificial Sequence
  Synthetic
caucccgcaggcucaccugcu

SEQ ID NO: 2639 - RNA, 21 nt, Artificial Sequence
  Synthetic
ccacgccggagaagcagguga

SEQ ID NO: 2640 - RNA, 21 nt, Artificial Sequence
  Synthetic
cccgcaggcucaccugcuucu

SEQ ID NO: 2641 - RNA, 21 nt, Artificial Sequence
  Synthetic
ccgcaggcucaccugcuucuc

SEQ ID NO: 2642 - RNA, 21 nt, Artificial Sequence
  Synthetic
ccggagaagcaggugagccug

SEQ ID NO: 2643 - RNA, 21 nt, Artificial Sequence
  Synthetic
ccugcuucuccggcguggaag

SEQ ID NO: 2644 - RNA, 21 nt, Artificial Sequence
  Synthetic
ccuuacuucuuccacgccgga

SEQ ID NO: 2645 - RNA, 21 nt, Artificial Sequence
  Synthetic
cgcaggcucaccugcuucucc

SEQ ID NO: 2646 - RNA, 21 nt, Artificial Sequence
  Synthetic
cgcaucccgcaggcucaccug

SEQ ID NO: 2647 - RNA, 21 nt, Artificial Sequence
  Synthetic
cgccggagaagcaggugagcc

SEQ ID NO: 2648 - RNA, 21 nt, Artificial Sequence
  Synthetic
cggagaagcaggugagccugc

SEQ ID NO: 2649 - RNA, 21 nt, Artificial Sequence
  Synthetic
cucaccugcuucuccggcgug

SEQ ID NO: 2650 - RNA, 21 nt, Artificial Sequence
  Synthetic
cucgcaucccgcaggcucacc

SEQ ID NO: 2651 - RNA, 21 nt, Artificial Sequence
  Synthetic
cugcuucuccggcguggaaga

SEQ ID NO: 2652 - RNA, 21 nt, Artificial Sequence
  Synthetic
cuuacuucuuccacgccggag

SEQ ID NO: 2653 - RNA, 21 nt, Artificial Sequence
  Synthetic
cuuccacgccggagaagcagg

SEQ ID NO: 2654 - RNA, 21 nt, Artificial Sequence
  Synthetic
cuucuuccacgccggagaagc

SEQ ID NO: 2655 - RNA, 21 nt, Artificial Sequence
  Synthetic
gaagcaggugagccugcggga

SEQ ID NO: 2656 - RNA, 21 nt, Artificial Sequence
  Synthetic
gagaagcaggugagccugcgg

SEQ ID NO: 2657 - RNA, 21 nt, Artificial Sequence
  Synthetic
gcaggcucaccugcuucuccg

SEQ ID NO: 2658 - RNA, 21 nt, Artificial Sequence
  Synthetic
gcaucccgcaggcucaccugc

SEQ ID NO: 2659 - RNA, 21 nt, Artificial Sequence
  Synthetic
gccggagaagcaggugagccu

SEQ ID NO: 2660 - RNA, 21 nt, Artificial Sequence
  Synthetic
gcucaccugcuucuccggcgu

SEQ ID NO: 2661 - RNA, 21 nt, Artificial Sequence
  Synthetic
gcucgcaucccgcaggcucac

SEQ ID NO: 2662 - RNA, 21 nt, Artificial Sequence
  Synthetic
gcuucuccggcguggaagaag

SEQ ID NO: 2663 - RNA, 21 nt, Artificial Sequence
  Synthetic
ggagaagcaggugagccugcg

SEQ ID NO: 2664 - RNA, 21 nt, Artificial Sequence
  Synthetic
ggcucaccugcuucuccggcg

SEQ ID NO: 2665 - RNA, 21 nt, Artificial Sequence
  Synthetic
uacuucuuccacgccggagaa

SEQ ID NO: 2666 - RNA, 21 nt, Artificial Sequence
  Synthetic
ucaccugcuucuccggcgugg

SEQ ID NO: 2667 - RNA, 21 nt, Artificial Sequence
  Synthetic
uccacgccggagaagcaggug

SEQ ID NO: 2668 - RNA, 21 nt, Artificial Sequence
  Synthetic
ucccgcaggcucaccugcuuc

SEQ ID NO: 2669 - RNA, 21 nt, Artificial Sequence
  Synthetic
ucgcaucccgcaggcucaccu

SEQ ID NO: 2670 - RNA, 21 nt, Artificial Sequence
  Synthetic
ucuuccacgccggagaagcag

SEQ ID NO: 2671 - RNA, 21 nt, Artificial Sequence
  Synthetic
ugcuucuccggcguggaagaa

SEQ ID NO: 2672 - RNA, 21 nt, Artificial Sequence
  Synthetic
uuacuucuuccacgccggaga

SEQ ID NO: 2673 - RNA, 21 nt, Artificial Sequence
  Synthetic
uuccacgccggagaagcaggu

SEQ ID NO: 2674 - RNA, 21 nt, Artificial Sequence
  Synthetic
uucuuccacgccggagaagca

SEQ ID NO: 2675 - RNA, 22 nt, Artificial Sequence
  Synthetic
aagcaggugagccugcgggaug

SEQ ID NO: 2676 - RNA, 22 nt, Artificial Sequence
  Synthetic
accugcuucuccggcguggaag

SEQ ID NO: 2677 - RNA, 22 nt, Artificial Sequence
  Synthetic
acgccggagaagcaggugagcc

SEQ ID NO: 2678 - RNA, 22 nt, Artificial Sequence
  Synthetic
acuucuuccacgccggagaagc

SEQ ID NO: 2679 - RNA, 22 nt, Artificial Sequence
  Synthetic
agaagcaggugagccugcggga

SEQ ID NO: 2680 - RNA, 22 nt, Artificial Sequence
  Synthetic
agcaggugagccugcgggaugc

SEQ ID NO: 2681 - RNA, 22 nt, Artificial Sequence
  Synthetic
aggcucaccugcuucuccggcg

SEQ ID NO: 2682 - RNA, 22 nt, Artificial Sequence
  Synthetic
aucccgcaggcucaccugcuuc

SEQ ID NO: 2683 - RNA, 22 nt, Artificial Sequence
  Synthetic
caccugcuucuccggcguggaa

SEQ ID NO: 2684 - RNA, 22 nt, Artificial Sequence
  Synthetic
cacgccggagaagcaggugagc

SEQ ID NO: 2685 - RNA, 22 nt, Artificial Sequence
  Synthetic
caggcucaccugcuucuccggc

SEQ ID NO: 2686 - RNA, 22 nt, Artificial Sequence
  Synthetic
caucccgcaggcucaccugcuu

SEQ ID NO: 2687 - RNA, 22 nt, Artificial Sequence
  Synthetic
ccacgccggagaagcaggugag

SEQ ID NO: 2688 - RNA, 22 nt, Artificial Sequence
  Synthetic
cccgcaggcucaccugcuucuc

SEQ ID NO: 2689 - RNA, 22 nt, Artificial Sequence
  Synthetic
ccgcaggcucaccugcuucucc

SEQ ID NO: 2690 - RNA, 22 nt, Artificial Sequence
  Synthetic
ccggagaagcaggugagccugc

SEQ ID NO: 2691 - RNA, 22 nt, Artificial Sequence
  Synthetic
ccugcuucuccggcguggaaga

SEQ ID NO: 2692 - RNA, 22 nt, Artificial Sequence
  Synthetic
ccuuacuucuuccacgccggag

SEQ ID NO: 2693 - RNA, 22 nt, Artificial Sequence
  Synthetic
cgcaggcucaccugcuucuccg

SEQ ID NO: 2694 - RNA, 22 nt, Artificial Sequence
  Synthetic
cgcaucccgcaggcucaccugc

SEQ ID NO: 2695 - RNA, 22 nt, Artificial Sequence
  Synthetic
cgccggagaagcaggugagccu

SEQ ID NO: 2696 - RNA, 22 nt, Artificial Sequence
  Synthetic
cggagaagcaggugagccugcg

SEQ ID NO: 2697 - RNA, 22 nt, Artificial Sequence
  Synthetic
cucaccugcuucuccggcgugg

SEQ ID NO: 2698 - RNA, 22 nt, Artificial Sequence
  Synthetic
cucgcaucccgcaggcucaccu

SEQ ID NO: 2699 - RNA, 22 nt, Artificial Sequence
  Synthetic
cugcuucuccggcguggaagaa

SEQ ID NO: 2700 - RNA, 22 nt, Artificial Sequence
  Synthetic
cuuacuucuuccacgccggaga

SEQ ID NO: 2701 - RNA, 22 nt, Artificial Sequence
  Synthetic
cuuccacgccggagaagcaggu

SEQ ID NO: 2702 - RNA, 22 nt, Artificial Sequence
  Synthetic
cuucuuccacgccggagaagca

SEQ ID NO: 2703 - RNA, 22 nt, Artificial Sequence
  Synthetic
gaagcaggugagccugcgggau

SEQ ID NO: 2704 - RNA, 22 nt, Artificial Sequence
  Synthetic
gagaagcaggugagccugcggg

SEQ ID NO: 2705 - RNA, 22 nt, Artificial Sequence
  Synthetic
gcaggcucaccugcuucuccgg

SEQ ID NO: 2706 - RNA, 22 nt, Artificial Sequence
  Synthetic
gcaucccgcaggcucaccugcu

SEQ ID NO: 2707 - RNA, 22 nt, Artificial Sequence
  Synthetic
gccggagaagcaggugagccug

SEQ ID NO: 2708 - RNA, 22 nt, Artificial Sequence
  Synthetic
gccuuacuucuuccacgccgga

SEQ ID NO: 2709 - RNA, 22 nt, Artificial Sequence
  Synthetic
gcucaccugcuucuccggcgug

SEQ ID NO: 2710 - RNA, 22 nt, Artificial Sequence
  Synthetic
gcucgcaucccgcaggcucacc

SEQ ID NO: 2711 - RNA, 22 nt, Artificial Sequence
  Synthetic
gcuucuccggcguggaagaagu

SEQ ID NO: 2712 - RNA, 22 nt, Artificial Sequence
  Synthetic
ggagaagcaggugagccugcgg

SEQ ID NO: 2713 - RNA, 22 nt, Artificial Sequence
  Synthetic
ggcucaccugcuucuccggcgu

SEQ ID NO: 2714 - RNA, 22 nt, Artificial Sequence
  Synthetic
uacuucuuccacgccggagaag

SEQ ID NO: 2715 - RNA, 22 nt, Artificial Sequence
  Synthetic
ucaccugcuucuccggcgugga

SEQ ID NO: 2716 - RNA, 22 nt, Artificial Sequence
  Synthetic
uccacgccggagaagcagguga

SEQ ID NO: 2717 - RNA, 22 nt, Artificial Sequence
  Synthetic
ucccgcaggcucaccugcuucu

SEQ ID NO: 2718 - RNA, 22 nt, Artificial Sequence
  Synthetic
ucgcaucccgcaggcucaccug

SEQ ID NO: 2719 - RNA, 22 nt, Artificial Sequence
  Synthetic
ucuuccacgccggagaagcagg

SEQ ID NO: 2720 - RNA, 22 nt, Artificial Sequence
  Synthetic
ugcucgcaucccgcaggcucac

SEQ ID NO: 2721 - RNA, 22 nt, Artificial Sequence
  Synthetic
ugcuucuccggcguggaagaag

SEQ ID NO: 2722 - RNA, 22 nt, Artificial Sequence
  Synthetic
uuacuucuuccacgccggagaa

SEQ ID NO: 2723 - RNA, 22 nt, Artificial Sequence
  Synthetic
uuccacgccggagaagcaggug

SEQ ID NO: 2724 - RNA, 22 nt, Artificial Sequence
  Synthetic
uucuuccacgccggagaagcag

SEQ ID NO: 2725 - RNA, 20 nt, Artificial Sequence
  Synthetic
accuguuucucuggcgugga

SEQ ID NO: 2726 - RNA, 20 nt, Artificial Sequence
  Synthetic
acgccagagaaacaggugag

SEQ ID NO: 2727 - RNA, 20 nt, Artificial Sequence
  Synthetic
acuucuuccacgccagagaa

SEQ ID NO: 2728 - RNA, 20 nt, Artificial Sequence
  Synthetic
agcugccuuacuucuuccac

SEQ ID NO: 2729 - RNA, 20 nt, Artificial Sequence
  Synthetic
aggcucaccuguuucucugg

SEQ ID NO: 2730 - RNA, 20 nt, Artificial Sequence
  Synthetic
caccuguuucucuggcgugg

SEQ ID NO: 2731 - RNA, 20 nt, Artificial Sequence
  Synthetic
cacgccagagaaacagguga

SEQ ID NO: 2732 - RNA, 20 nt, Artificial Sequence
  Synthetic
cagagaaacaggugagccug

SEQ ID NO: 2733 - RNA, 20 nt, Artificial Sequence
  Synthetic
caggcucaccuguuucucug

SEQ ID NO: 2734 - RNA, 20 nt, Artificial Sequence
  Synthetic
ccacgccagagaaacaggug

SEQ ID NO: 2735 - RNA, 20 nt, Artificial Sequence
  Synthetic
ccagagaaacaggugagccu

SEQ ID NO: 2736 - RNA, 20 nt, Artificial Sequence
  Synthetic
cccgcaggcucaccuguuuc

SEQ ID NO: 2737 - RNA, 20 nt, Artificial Sequence
  Synthetic
ccgcaggcucaccuguuucu

SEQ ID NO: 2738 - RNA, 20 nt, Artificial Sequence
  Synthetic
ccuguuucucuggcguggaa

SEQ ID NO: 2739 - RNA, 20 nt, Artificial Sequence
  Synthetic
ccuuacuucuuccacgccag

SEQ ID NO: 2740 - RNA, 20 nt, Artificial Sequence
  Synthetic
cgcaggcucaccuguuucuc

SEQ ID NO: 2741 - RNA, 20 nt, Artificial Sequence
  Synthetic
cgccagagaaacaggugagc

SEQ ID NO: 2742 - RNA, 20 nt, Artificial Sequence
  Synthetic
cucaccuguuucucuggcgu

SEQ ID NO: 2743 - RNA, 20 nt, Artificial Sequence
  Synthetic
cucuggcguggaagaaguaa

SEQ ID NO: 2744 - RNA, 20 nt, Artificial Sequence
  Synthetic
cugccuuacuucuuccacgc

SEQ ID NO: 2745 - RNA, 20 nt, Artificial Sequence
  Synthetic
cuggcguggaagaaguaagg

SEQ ID NO: 2746 - RNA, 20 nt, Artificial Sequence
  Synthetic
cuguuucucuggcguggaag

SEQ ID NO: 2747 - RNA, 20 nt, Artificial Sequence
  Synthetic
cuuacuucuuccacgccaga

SEQ ID NO: 2748 - RNA, 20 nt, Artificial Sequence
  Synthetic
cuuccacgccagagaaacag

SEQ ID NO: 2749 - RNA, 20 nt, Artificial Sequence
  Synthetic
cuucuuccacgccagagaaa

SEQ ID NO: 2750 - RNA, 20 nt, Artificial Sequence
  Synthetic
gcaggcucaccuguuucucu

SEQ ID NO: 2751 - RNA, 20 nt, Artificial Sequence
  Synthetic
gccagagaaacaggugagcc

SEQ ID NO: 2752 - RNA, 20 nt, Artificial Sequence
  Synthetic
gccuuacuucuuccacgcca

SEQ ID NO: 2753 - RNA, 20 nt, Artificial Sequence
  Synthetic
gcucaccuguuucucuggcg

SEQ ID NO: 2754 - RNA, 20 nt, Artificial Sequence
  Synthetic
gcugccuuacuucuuccacg

SEQ ID NO: 2755 - RNA, 20 nt, Artificial Sequence
  Synthetic
ggcucaccuguuucucuggc

SEQ ID NO: 2756 - RNA, 20 nt, Artificial Sequence
  Synthetic
guuucucuggcguggaagaa

SEQ ID NO: 2757 - RNA, 20 nt, Artificial Sequence
  Synthetic
uacuucuuccacgccagaga

SEQ ID NO: 2758 - RNA, 20 nt, Artificial Sequence
  Synthetic
ucaccuguuucucuggcgug

SEQ ID NO: 2759 - RNA, 20 nt, Artificial Sequence
  Synthetic
uccacgccagagaaacaggu

SEQ ID NO: 2760 - RNA, 20 nt, Artificial Sequence
  Synthetic
ucccgcaggcucaccuguuu

SEQ ID NO: 2761 - RNA, 20 nt, Artificial Sequence
  Synthetic
ucucuggcguggaagaagua

SEQ ID NO: 2762 - RNA, 20 nt, Artificial Sequence
  Synthetic
ucuggcguggaagaaguaag

SEQ ID NO: 2763 - RNA, 20 nt, Artificial Sequence
  Synthetic
ucuuccacgccagagaaaca

SEQ ID NO: 2764 - RNA, 20 nt, Artificial Sequence
  Synthetic
ugccuuacuucuuccacgcc

SEQ ID NO: 2765 - RNA, 20 nt, Artificial Sequence
  Synthetic
uguuucucuggcguggaaga

SEQ ID NO: 2766 - RNA, 20 nt, Artificial Sequence
  Synthetic
uuacuucuuccacgccagag

SEQ ID NO: 2767 - RNA, 20 nt, Artificial Sequence
  Synthetic
uuccacgccagagaaacagg

SEQ ID NO: 2768 - RNA, 20 nt, Artificial Sequence
  Synthetic
uucucuggcguggaagaagu

SEQ ID NO: 2769 - RNA, 20 nt, Artificial Sequence
  Synthetic
uucuuccacgccagagaaac

SEQ ID NO: 2770 - RNA, 20 nt, Artificial Sequence
  Synthetic
uuucucuggcguggaagaag

SEQ ID NO: 2771 - RNA, 21 nt, Artificial Sequence
  Synthetic
aagcugccuuacuucuuccac

SEQ ID NO: 2772 - RNA, 21 nt, Artificial Sequence
  Synthetic
accuguuucucuggcguggaa

SEQ ID NO: 2773 - RNA, 21 nt, Artificial Sequence
  Synthetic
acgccagagaaacaggugagc

SEQ ID NO: 2774 - RNA, 21 nt, Artificial Sequence
  Synthetic
acuucuuccacgccagagaaa

SEQ ID NO: 2775 - RNA, 21 nt, Artificial Sequence
  Synthetic
agcugccuuacuucuuccacg

SEQ ID NO: 2776 - RNA, 21 nt, Artificial Sequence
  Synthetic
aggcucaccuguuucucuggc

SEQ ID NO: 2777 - RNA, 21 nt, Artificial Sequence
  Synthetic
aucccgcaggcucaccuguuu

SEQ ID NO: 2778 - RNA, 21 nt, Artificial Sequence
  Synthetic
caccuguuucucuggcgugga

SEQ ID NO: 2779 - RNA, 21 nt, Artificial Sequence
  Synthetic
cacgccagagaaacaggugag

SEQ ID NO: 2780 - RNA, 21 nt, Artificial Sequence
  Synthetic
cagagaaacaggugagccugc

SEQ ID NO: 2781 - RNA, 21 nt, Artificial Sequence
  Synthetic
caggcucaccuguuucucugg

SEQ ID NO: 2782 - RNA, 21 nt, Artificial Sequence
  Synthetic
ccacgccagagaaacagguga

SEQ ID NO: 2783 - RNA, 21 nt, Artificial Sequence
  Synthetic
ccagagaaacaggugagccug

SEQ ID NO: 2784 - RNA, 21 nt, Artificial Sequence
  Synthetic
cccgcaggcucaccuguuucu

SEQ ID NO: 2785 - RNA, 21 nt, Artificial Sequence
  Synthetic
ccgcaggcucaccuguuucuc

SEQ ID NO: 2786 - RNA, 21 nt, Artificial Sequence
  Synthetic
ccuguuucucuggcguggaag

SEQ ID NO: 2787 - RNA, 21 nt, Artificial Sequence
  Synthetic
ccuuacuucuuccacgccaga

SEQ ID NO: 2788 - RNA, 21 nt, Artificial Sequence
  Synthetic
cgcaggcucaccuguuucucu

SEQ ID NO: 2789 - RNA, 21 nt, Artificial Sequence
  Synthetic
cgccagagaaacaggugagcc

SEQ ID NO: 2790 - RNA, 21 nt, Artificial Sequence
  Synthetic
cucaccuguuucucuggcgug

SEQ ID NO: 2791 - RNA, 21 nt, Artificial Sequence
  Synthetic
cucuggcguggaagaaguaag

SEQ ID NO: 2792 - RNA, 21 nt, Artificial Sequence
  Synthetic
cugccuuacuucuuccacgcc

SEQ ID NO: 2793 - RNA, 21 nt, Artificial Sequence
  Synthetic
cuggcguggaagaaguaaggc

SEQ ID NO: 2794 - RNA, 21 nt, Artificial Sequence
  Synthetic
cuguuucucuggcguggaaga

SEQ ID NO: 2795 - RNA, 21 nt, Artificial Sequence
  Synthetic
cuuacuucuuccacgccagag

SEQ ID NO: 2796 - RNA, 21 nt, Artificial Sequence
  Synthetic
cuuccacgccagagaaacagg

SEQ ID NO: 2797 - RNA, 21 nt, Artificial Sequence
  Synthetic
cuucuuccacgccagagaaac

SEQ ID NO: 2798 - RNA, 21 nt, Artificial Sequence
  Synthetic
gcaggcucaccuguuucucug

SEQ ID NO: 2799 - RNA, 21 nt, Artificial Sequence
  Synthetic
gccagagaaacaggugagccu

SEQ ID NO: 2800 - RNA, 21 nt, Artificial Sequence
  Synthetic
gccuuacuucuuccacgccag

SEQ ID NO: 2801 - RNA, 21 nt, Artificial Sequence
  Synthetic
gcucaccuguuucucuggcgu

SEQ ID NO: 2802 - RNA, 21 nt, Artificial Sequence
  Synthetic
gcugccuuacuucuuccacgc

SEQ ID NO: 2803 - RNA, 21 nt, Artificial Sequence
  Synthetic
ggcucaccuguuucucuggcg

SEQ ID NO: 2804 - RNA, 21 nt, Artificial Sequence
  Synthetic
guuucucuggcguggaagaag

SEQ ID NO: 2805 - RNA, 21 nt, Artificial Sequence
  Synthetic
uacuucuuccacgccagagaa

SEQ ID NO: 2806 - RNA, 21 nt, Artificial Sequence
  Synthetic
ucaccuguuucucuggcgugg

SEQ ID NO: 2807 - RNA, 21 nt, Artificial Sequence
  Synthetic
uccacgccagagaaacaggug

SEQ ID NO: 2808 - RNA, 21 nt, Artificial Sequence
  Synthetic
ucccgcaggcucaccuguuuc

SEQ ID NO: 2809 - RNA, 21 nt, Artificial Sequence
  Synthetic
ucucuggcguggaagaaguaa

SEQ ID NO: 2810 - RNA, 21 nt, Artificial Sequence
  Synthetic
ucuggcguggaagaaguaagg

SEQ ID NO: 2811 - RNA, 21 nt, Artificial Sequence
  Synthetic
ucuuccacgccagagaaacag

SEQ ID NO: 2812 - RNA, 21 nt, Artificial Sequence
  Synthetic
ugccuuacuucuuccacgcca

SEQ ID NO: 2813 - RNA, 21 nt, Artificial Sequence
  Synthetic
uguuucucuggcguggaagaa

SEQ ID NO: 2814 - RNA, 21 nt, Artificial Sequence
  Synthetic
uuacuucuuccacgccagaga

SEQ ID NO: 2815 - RNA, 21 nt, Artificial Sequence
  Synthetic
uuccacgccagagaaacaggu

SEQ ID NO: 2816 - RNA, 21 nt, Artificial Sequence
  Synthetic
uucucuggcguggaagaagua

SEQ ID NO: 2817 - RNA, 21 nt, Artificial Sequence
  Synthetic
uucuuccacgccagagaaaca

SEQ ID NO: 2818 - RNA, 21 nt, Artificial Sequence
  Synthetic
uuucucuggcguggaagaagu

SEQ ID NO: 2819 - RNA, 22 nt, Artificial Sequence
  Synthetic
aagcugccuuacuucuuccacg

SEQ ID NO: 2820 - RNA, 22 nt, Artificial Sequence
  Synthetic
accuguuucucuggcguggaag

SEQ ID NO: 2821 - RNA, 22 nt, Artificial Sequence
  Synthetic
acgccagagaaacaggugagcc

SEQ ID NO: 2822 - RNA, 22 nt, Artificial Sequence
  Synthetic
acuucuuccacgccagagaaac

SEQ ID NO: 2823 - RNA, 22 nt, Artificial Sequence
  Synthetic
agcugccuuacuucuuccacgc

SEQ ID NO: 2824 - RNA, 22 nt, Artificial Sequence
  Synthetic
aggcucaccuguuucucuggcg

SEQ ID NO: 2825 - RNA, 22 nt, Artificial Sequence
  Synthetic
aucccgcaggcucaccuguuuc

SEQ ID NO: 2826 - RNA, 22 nt, Artificial Sequence
  Synthetic
caccuguuucucuggcguggaa

SEQ ID NO: 2827 - RNA, 22 nt, Artificial Sequence
  Synthetic
cacgccagagaaacaggugagc

SEQ ID NO: 2828 - RNA, 22 nt, Artificial Sequence
  Synthetic
cagagaaacaggugagccugcg

SEQ ID NO: 2829 - RNA, 22 nt, Artificial Sequence
  Synthetic
caggcucaccuguuucucuggc

SEQ ID NO: 2830 - RNA, 22 nt, Artificial Sequence
  Synthetic
caucccgcaggcucaccuguuu

SEQ ID NO: 2831 - RNA, 22 nt, Artificial Sequence
  Synthetic
ccacgccagagaaacaggugag

SEQ ID NO: 2832 - RNA, 22 nt, Artificial Sequence
  Synthetic
ccagagaaacaggugagccugc

SEQ ID NO: 2833 - RNA, 22 nt, Artificial Sequence
  Synthetic
cccgcaggcucaccuguuucuc

SEQ ID NO: 2834 - RNA, 22 nt, Artificial Sequence
  Synthetic
ccgcaggcucaccuguuucucu

SEQ ID NO: 2835 - RNA, 22 nt, Artificial Sequence
  Synthetic
ccuguuucucuggcguggaaga

SEQ ID NO: 2836 - RNA, 22 nt, Artificial Sequence
  Synthetic
ccuuacuucuuccacgccagag

SEQ ID NO: 2837 - RNA, 22 nt, Artificial Sequence
  Synthetic
cgcaggcucaccuguuucucug

SEQ ID NO: 2838 - RNA, 22 nt, Artificial Sequence
  Synthetic
cgccagagaaacaggugagccu

SEQ ID NO: 2839 - RNA, 22 nt, Artificial Sequence
  Synthetic
cucaccuguuucucuggcgugg

SEQ ID NO: 2840 - RNA, 22 nt, Artificial Sequence
  Synthetic
cucuggcguggaagaaguaagg

SEQ ID NO: 2841 - RNA, 22 nt, Artificial Sequence
  Synthetic
cugccuuacuucuuccacgcca

SEQ ID NO: 2842 - RNA, 22 nt, Artificial Sequence
  Synthetic
cuggcguggaagaaguaaggca

SEQ ID NO: 2843 - RNA, 22 nt, Artificial Sequence
  Synthetic
cuguuucucuggcguggaagaa

SEQ ID NO: 2844 - RNA, 22 nt, Artificial Sequence
  Synthetic
cuuacuucuuccacgccagaga

SEQ ID NO: 2845 - RNA, 22 nt, Artificial Sequence
  Synthetic
cuuccacgccagagaaacaggu

SEQ ID NO: 2846 - RNA, 22 nt, Artificial Sequence
  Synthetic
cuucuuccacgccagagaaaca

SEQ ID NO: 2847 - RNA, 22 nt, Artificial Sequence
  Synthetic
gcaggcucaccuguuucucugg

SEQ ID NO: 2848 - RNA, 22 nt, Artificial Sequence
  Synthetic
gccagagaaacaggugagccug

SEQ ID NO: 2849 - RNA, 22 nt, Artificial Sequence
  Synthetic
gccuuacuucuuccacgccaga

SEQ ID NO: 2850 - RNA, 22 nt, Artificial Sequence
  Synthetic
gcucaccuguuucucuggcgug

SEQ ID NO: 2851 - RNA, 22 nt, Artificial Sequence
  Synthetic
gcugccuuacuucuuccacgcc

SEQ ID NO: 2852 - RNA, 22 nt, Artificial Sequence
  Synthetic
ggcucaccuguuucucuggcgu

SEQ ID NO: 2853 - RNA, 22 nt, Artificial Sequence
  Synthetic
guuucucuggcguggaagaagu

SEQ ID NO: 2854 - RNA, 22 nt, Artificial Sequence
  Synthetic
uaagcugccuuacuucuuccac

SEQ ID NO: 2855 - RNA, 22 nt, Artificial Sequence
  Synthetic
uacuucuuccacgccagagaaa

SEQ ID NO: 2856 - RNA, 22 nt, Artificial Sequence
  Synthetic
ucaccuguuucucuggcgugga

SEQ ID NO: 2857 - RNA, 22 nt, Artificial Sequence
  Synthetic
uccacgccagagaaacagguga

SEQ ID NO: 2858 - RNA, 22 nt, Artificial Sequence
  Synthetic
ucccgcaggcucaccuguuucu

SEQ ID NO: 2859 - RNA, 22 nt, Artificial Sequence
  Synthetic
ucucuggcguggaagaaguaag

SEQ ID NO: 2860 - RNA, 22 nt, Artificial Sequence
  Synthetic
ucuggcguggaagaaguaaggc

SEQ ID NO: 2861 - RNA, 22 nt, Artificial Sequence
  Synthetic
ucuuccacgccagagaaacagg

SEQ ID NO: 2862 - RNA, 22 nt, Artificial Sequence
  Synthetic
ugccuuacuucuuccacgccag

SEQ ID NO: 2863 - RNA, 22 nt, Artificial Sequence
  Synthetic
uguuucucuggcguggaagaag

SEQ ID NO: 2864 - RNA, 22 nt, Artificial Sequence
  Synthetic
uuacuucuuccacgccagagaa

SEQ ID NO: 2865 - RNA, 22 nt, Artificial Sequence
  Synthetic
uuccacgccagagaaacaggug

SEQ ID NO: 2866 - RNA, 22 nt, Artificial Sequence
  Synthetic
uucucuggcguggaagaaguaa

SEQ ID NO: 2867 - RNA, 22 nt, Artificial Sequence
  Synthetic
uucuuccacgccagagaaacag

SEQ ID NO: 2868 - RNA, 22 nt, Artificial Sequence
  Synthetic
uuucucuggcguggaagaagua

SEQ ID NO: 2869 - RNA, 20 nt, Artificial Sequence
  Synthetic
aagcugccuuacuucuucca

SEQ ID NO: 2870 - RNA, 20 nt, Artificial Sequence
  Synthetic
acaccggagaaacaggugag

SEQ ID NO: 2871 - RNA, 20 nt, Artificial Sequence
  Synthetic
accuguuucuccggugugga

SEQ ID NO: 2872 - RNA, 20 nt, Artificial Sequence
  Synthetic
acuucuuccacaccggagaa

SEQ ID NO: 2873 - RNA, 20 nt, Artificial Sequence
  Synthetic
aggcucaccuguuucuccgg

SEQ ID NO: 2874 - RNA, 20 nt, Artificial Sequence
  Synthetic
cacaccggagaaacagguga

SEQ ID NO: 2875 - RNA, 20 nt, Artificial Sequence
  Synthetic
caccggagaaacaggugagc

SEQ ID NO: 2876 - RNA, 20 nt, Artificial Sequence
  Synthetic
caccuguuucuccggugugg

SEQ ID NO: 2877 - RNA, 20 nt, Artificial Sequence
  Synthetic
caggcucaccuguuucuccg

SEQ ID NO: 2878 - RNA, 20 nt, Artificial Sequence
  Synthetic
ccacaccggagaaacaggug

SEQ ID NO: 2879 - RNA, 20 nt, Artificial Sequence
  Synthetic
ccgguguggaagaaguaagg

SEQ ID NO: 2880 - RNA, 20 nt, Artificial Sequence
  Synthetic
ccuguuucuccgguguggaa

SEQ ID NO: 2881 - RNA, 20 nt, Artificial Sequence
  Synthetic
ccuuacuucuuccacaccgg

SEQ ID NO: 2882 - RNA, 20 nt, Artificial Sequence
  Synthetic
cgguguggaagaaguaaggc

SEQ ID NO: 2883 - RNA, 20 nt, Artificial Sequence
  Synthetic
cucaccuguuucuccggugu

SEQ ID NO: 2884 - RNA, 20 nt, Artificial Sequence
  Synthetic
cuccgguguggaagaaguaa

SEQ ID NO: 2885 - RNA, 20 nt, Artificial Sequence
  Synthetic
cugccuuacuucuuccacac

SEQ ID NO: 2886 - RNA, 20 nt, Artificial Sequence
  Synthetic
cuguuucuccgguguggaag

SEQ ID NO: 2887 - RNA, 20 nt, Artificial Sequence
  Synthetic
cuuacuucuuccacaccgga

SEQ ID NO: 2888 - RNA, 20 nt, Artificial Sequence
  Synthetic
cuuccacaccggagaaacag

SEQ ID NO: 2889 - RNA, 20 nt, Artificial Sequence
  Synthetic
cuucuuccacaccggagaaa

SEQ ID NO: 2890 - RNA, 20 nt, Artificial Sequence
  Synthetic
gcaggcucaccuguuucucc

SEQ ID NO: 2891 - RNA, 20 nt, Artificial Sequence
  Synthetic
gccuuacuucuuccacaccg

SEQ ID NO: 2892 - RNA, 20 nt, Artificial Sequence
  Synthetic
gcucaccuguuucuccggug

SEQ ID NO: 2893 - RNA, 20 nt, Artificial Sequence
  Synthetic
gcugccuuacuucuuccaca

SEQ ID NO: 2894 - RNA, 20 nt, Artificial Sequence
  Synthetic
ggcucaccuguuucuccggu

SEQ ID NO: 2895 - RNA, 20 nt, Artificial Sequence
  Synthetic
gguguggaagaaguaaggca

SEQ ID NO: 2896 - RNA, 20 nt, Artificial Sequence
  Synthetic
guguggaagaaguaaggcag

SEQ ID NO: 2897 - RNA, 20 nt, Artificial Sequence
  Synthetic
guuucuccgguguggaagaa

SEQ ID NO: 2898 - RNA, 20 nt, Artificial Sequence
  Synthetic
uaagcugccuuacuucuucc

SEQ ID NO: 2899 - RNA, 20 nt, Artificial Sequence
  Synthetic
uacuucuuccacaccggaga

SEQ ID NO: 2900 - RNA, 20 nt, Artificial Sequence
  Synthetic
ucaccuguuucuccggugug

SEQ ID NO: 2901 - RNA, 20 nt, Artificial Sequence
  Synthetic
uccacaccggagaaacaggu

SEQ ID NO: 2902 - RNA, 20 nt, Artificial Sequence
  Synthetic
uccgguguggaagaaguaag

SEQ ID NO: 2903 - RNA, 20 nt, Artificial Sequence
  Synthetic
ucuccgguguggaagaagua

SEQ ID NO: 2904 - RNA, 20 nt, Artificial Sequence
  Synthetic
ucuuccacaccggagaaaca

SEQ ID NO: 2905 - RNA, 20 nt, Artificial Sequence
  Synthetic
ugccuuacuucuuccacacc

SEQ ID NO: 2906 - RNA, 20 nt, Artificial Sequence
  Synthetic
uguuucuccgguguggaaga

SEQ ID NO: 2907 - RNA, 20 nt, Artificial Sequence
  Synthetic
uuaagcugccuuacuucuuc

SEQ ID NO: 2908 - RNA, 20 nt, Artificial Sequence
  Synthetic
uuacuucuuccacaccggag

SEQ ID NO: 2909 - RNA, 20 nt, Artificial Sequence
  Synthetic
uuccacaccggagaaacagg

SEQ ID NO: 2910 - RNA, 20 nt, Artificial Sequence
  Synthetic
uucuccgguguggaagaagu

SEQ ID NO: 2911 - RNA, 20 nt, Artificial Sequence
  Synthetic
uucuuccacaccggagaaac

SEQ ID NO: 2912 - RNA, 20 nt, Artificial Sequence
  Synthetic
uuucuccgguguggaagaag

SEQ ID NO: 2913 - RNA, 21 nt, Artificial Sequence
  Synthetic
acaccggagaaacaggugagc

SEQ ID NO: 2914 - RNA, 21 nt, Artificial Sequence
  Synthetic
accuguuucuccgguguggaa

SEQ ID NO: 2915 - RNA, 21 nt, Artificial Sequence
  Synthetic
acuucuuccacaccggagaaa

SEQ ID NO: 2916 - RNA, 21 nt, Artificial Sequence
  Synthetic
agcugccuuacuucuuccaca

SEQ ID NO: 2917 - RNA, 21 nt, Artificial Sequence
  Synthetic
aggcucaccuguuucuccggu

SEQ ID NO: 2918 - RNA, 21 nt, Artificial Sequence
  Synthetic
cacaccggagaaacaggugag

SEQ ID NO: 2919 - RNA, 21 nt, Artificial Sequence
  Synthetic
caccggagaaacaggugagcc

SEQ ID NO: 2920 - RNA, 21 nt, Artificial Sequence
  Synthetic
caccuguuucuccggugugga

SEQ ID NO: 2921 - RNA, 21 nt, Artificial Sequence
  Synthetic
caggcucaccuguuucuccgg

SEQ ID NO: 2922 - RNA, 21 nt, Artificial Sequence
  Synthetic
ccacaccggagaaacagguga

SEQ ID NO: 2923 - RNA, 21 nt, Artificial Sequence
  Synthetic
ccgguguggaagaaguaaggc

SEQ ID NO: 2924 - RNA, 21 nt, Artificial Sequence
  Synthetic
ccuguuucuccgguguggaag

SEQ ID NO: 2925 - RNA, 21 nt, Artificial Sequence
  Synthetic
ccuuacuucuuccacaccgga

SEQ ID NO: 2926 - RNA, 21 nt, Artificial Sequence
  Synthetic
cgcaggcucaccuguuucucc

SEQ ID NO: 2927 - RNA, 21 nt, Artificial Sequence
  Synthetic
cgguguggaagaaguaaggca

SEQ ID NO: 2928 - RNA, 21 nt, Artificial Sequence
  Synthetic
cucaccuguuucuccggugug

SEQ ID NO: 2929 - RNA, 21 nt, Artificial Sequence
  Synthetic
cuccgguguggaagaaguaag

SEQ ID NO: 2930 - RNA, 21 nt, Artificial Sequence
  Synthetic
cugccuuacuucuuccacacc

SEQ ID NO: 2931 - RNA, 21 nt, Artificial Sequence
  Synthetic
cuguuucuccgguguggaaga

SEQ ID NO: 2932 - RNA, 21 nt, Artificial Sequence
  Synthetic
cuuacuucuuccacaccggag

SEQ ID NO: 2933 - RNA, 21 nt, Artificial Sequence
  Synthetic
cuuccacaccggagaaacagg

SEQ ID NO: 2934 - RNA, 21 nt, Artificial Sequence
  Synthetic
cuucuuccacaccggagaaac

SEQ ID NO: 2935 - RNA, 21 nt, Artificial Sequence
  Synthetic
gcaggcucaccuguuucuccg

SEQ ID NO: 2936 - RNA, 21 nt, Artificial Sequence
  Synthetic
gccuuacuucuuccacaccgg

SEQ ID NO: 2937 - RNA, 21 nt, Artificial Sequence
  Synthetic
gcucaccuguuucuccggugu

SEQ ID NO: 2938 - RNA, 21 nt, Artificial Sequence
  Synthetic
gcugccuuacuucuuccacac

SEQ ID NO: 2939 - RNA, 21 nt, Artificial Sequence
  Synthetic
ggcucaccuguuucuccggug

SEQ ID NO: 2940 - RNA, 21 nt, Artificial Sequence
  Synthetic
gguguggaagaaguaaggcag

SEQ ID NO: 2941 - RNA, 21 nt, Artificial Sequence
  Synthetic
guguggaagaaguaaggcagc

SEQ ID NO: 2942 - RNA, 21 nt, Artificial Sequence
  Synthetic
guuaagcugccuuacuucuuc

SEQ ID NO: 2943 - RNA, 21 nt, Artificial Sequence
  Synthetic
guuucuccgguguggaagaag

SEQ ID NO: 2944 - RNA, 21 nt, Artificial Sequence
  Synthetic
uaagcugccuuacuucuucca

SEQ ID NO: 2945 - RNA, 21 nt, Artificial Sequence
  Synthetic
uacuucuuccacaccggagaa

SEQ ID NO: 2946 - RNA, 21 nt, Artificial Sequence
  Synthetic
ucaccuguuucuccggugugg

SEQ ID NO: 2947 - RNA, 21 nt, Artificial Sequence
  Synthetic
uccacaccggagaaacaggug

SEQ ID NO: 2948 - RNA, 21 nt, Artificial Sequence
  Synthetic
uccgguguggaagaaguaagg

SEQ ID NO: 2949 - RNA, 21 nt, Artificial Sequence
  Synthetic
ucuccgguguggaagaaguaa

SEQ ID NO: 2950 - RNA, 21 nt, Artificial Sequence
  Synthetic
ucuuccacaccggagaaacag

SEQ ID NO: 2951 - RNA, 21 nt, Artificial Sequence
  Synthetic
ugccuuacuucuuccacaccg

SEQ ID NO: 2952 - RNA, 21 nt, Artificial Sequence
  Synthetic
uguuucuccgguguggaagaa

SEQ ID NO: 2953 - RNA, 21 nt, Artificial Sequence
  Synthetic
uuaagcugccuuacuucuucc

SEQ ID NO: 2954 - RNA, 21 nt, Artificial Sequence
  Synthetic
uuacuucuuccacaccggaga

SEQ ID NO: 2955 - RNA, 21 nt, Artificial Sequence
  Synthetic
uuccacaccggagaaacaggu

SEQ ID NO: 2956 - RNA, 21 nt, Artificial Sequence
  Synthetic
uucuccgguguggaagaagua

SEQ ID NO: 2957 - RNA, 21 nt, Artificial Sequence
  Synthetic
uucuuccacaccggagaaaca

SEQ ID NO: 2958 - RNA, 21 nt, Artificial Sequence
  Synthetic
uuucuccgguguggaagaagu

SEQ ID NO: 2959 - RNA, 22 nt, Artificial Sequence
  Synthetic
aagcugccuuacuucuuccaca

SEQ ID NO: 2960 - RNA, 22 nt, Artificial Sequence
  Synthetic
acaccggagaaacaggugagcc

SEQ ID NO: 2961 - RNA, 22 nt, Artificial Sequence
  Synthetic
accuguuucuccgguguggaag

SEQ ID NO: 2962 - RNA, 22 nt, Artificial Sequence
  Synthetic
acuucuuccacaccggagaaac

SEQ ID NO: 2963 - RNA, 22 nt, Artificial Sequence
  Synthetic
agcugccuuacuucuuccacac

SEQ ID NO: 2964 - RNA, 22 nt, Artificial Sequence
  Synthetic
aggcucaccuguuucuccggug

SEQ ID NO: 2965 - RNA, 22 nt, Artificial Sequence
  Synthetic
cacaccggagaaacaggugagc

SEQ ID NO: 2966 - RNA, 22 nt, Artificial Sequence
  Synthetic
caccggagaaacaggugagccu

SEQ ID NO: 2967 - RNA, 22 nt, Artificial Sequence
  Synthetic
caccuguuucuccgguguggaa

SEQ ID NO: 2968 - RNA, 22 nt, Artificial Sequence
  Synthetic
caggcucaccuguuucuccggu

SEQ ID NO: 2969 - RNA, 22 nt, Artificial Sequence
  Synthetic
ccacaccggagaaacaggugag

SEQ ID NO: 2970 - RNA, 22 nt, Artificial Sequence
  Synthetic
ccgcaggcucaccuguuucucc

SEQ ID NO: 2971 - RNA, 22 nt, Artificial Sequence
  Synthetic
ccgguguggaagaaguaaggca

SEQ ID NO: 2972 - RNA, 22 nt, Artificial Sequence
  Synthetic
ccuguuucuccgguguggaaga

SEQ ID NO: 2973 - RNA, 22 nt, Artificial Sequence
  Synthetic
ccuuacuucuuccacaccggag

SEQ ID NO: 2974 - RNA, 22 nt, Artificial Sequence
  Synthetic
cgcaggcucaccuguuucuccg

SEQ ID NO: 2975 - RNA, 22 nt, Artificial Sequence
  Synthetic
cgguguggaagaaguaaggcag

SEQ ID NO: 2976 - RNA, 22 nt, Artificial Sequence
  Synthetic
cguuaagcugccuuacuucuuc

SEQ ID NO: 2977 - RNA, 22 nt, Artificial Sequence
  Synthetic
cucaccuguuucuccggugugg

SEQ ID NO: 2978 - RNA, 22 nt, Artificial Sequence
  Synthetic
cuccgguguggaagaaguaagg

SEQ ID NO: 2979 - RNA, 22 nt, Artificial Sequence
  Synthetic
cugccuuacuucuuccacaccg

SEQ ID NO: 2980 - RNA, 22 nt, Artificial Sequence
  Synthetic
cuguuucuccgguguggaagaa

SEQ ID NO: 2981 - RNA, 22 nt, Artificial Sequence
  Synthetic
cuuacuucuuccacaccggaga

SEQ ID NO: 2982 - RNA, 22 nt, Artificial Sequence
  Synthetic
cuuccacaccggagaaacaggu

SEQ ID NO: 2983 - RNA, 22 nt, Artificial Sequence
  Synthetic
cuucuuccacaccggagaaaca

SEQ ID NO: 2984 - RNA, 22 nt, Artificial Sequence
  Synthetic
gcaggcucaccuguuucuccgg

SEQ ID NO: 2985 - RNA, 22 nt, Artificial Sequence
  Synthetic
gccuuacuucuuccacaccgga

SEQ ID NO: 2986 - RNA, 22 nt, Artificial Sequence
  Synthetic
gcucaccuguuucuccggugug

SEQ ID NO: 2987 - RNA, 22 nt, Artificial Sequence
  Synthetic
gcugccuuacuucuuccacacc

SEQ ID NO: 2988 - RNA, 22 nt, Artificial Sequence
  Synthetic
ggcucaccuguuucuccggugu

SEQ ID NO: 2989 - RNA, 22 nt, Artificial Sequence
  Synthetic
gguguggaagaaguaaggcagc

SEQ ID NO: 2990 - RNA, 22 nt, Artificial Sequence
  Synthetic
guguggaagaaguaaggcagcu

SEQ ID NO: 2991 - RNA, 22 nt, Artificial Sequence
  Synthetic
guuaagcugccuuacuucuucc

SEQ ID NO: 2992 - RNA, 22 nt, Artificial Sequence
  Synthetic
guuucuccgguguggaagaagu

SEQ ID NO: 2993 - RNA, 22 nt, Artificial Sequence
  Synthetic
uacuucuuccacaccggagaaa

SEQ ID NO: 2994 - RNA, 22 nt, Artificial Sequence
  Synthetic
ucaccuguuucuccggugugga

SEQ ID NO: 2995 - RNA, 22 nt, Artificial Sequence
  Synthetic
uccacaccggagaaacagguga

SEQ ID NO: 2996 - RNA, 22 nt, Artificial Sequence
  Synthetic
uccgguguggaagaaguaaggc

SEQ ID NO: 2997 - RNA, 22 nt, Artificial Sequence
  Synthetic
ucuccgguguggaagaaguaag

SEQ ID NO: 2998 - RNA, 22 nt, Artificial Sequence
  Synthetic
ucuuccacaccggagaaacagg

SEQ ID NO: 2999 - RNA, 22 nt, Artificial Sequence
  Synthetic
ugccuuacuucuuccacaccgg

SEQ ID NO: 3000 - RNA, 22 nt, Artificial Sequence
  Synthetic
uguuucuccgguguggaagaag

SEQ ID NO: 3001 - RNA, 22 nt, Artificial Sequence
  Synthetic
uuaagcugccuuacuucuucca

SEQ ID NO: 3002 - RNA, 22 nt, Artificial Sequence
  Synthetic
uuacuucuuccacaccggagaa

SEQ ID NO: 3003 - RNA, 22 nt, Artificial Sequence
  Synthetic
uuccacaccggagaaacaggug

SEQ ID NO: 3004 - RNA, 22 nt, Artificial Sequence
  Synthetic
uucuccgguguggaagaaguaa

SEQ ID NO: 3005 - RNA, 22 nt, Artificial Sequence
  Synthetic
uucuuccacaccggagaaacag

SEQ ID NO: 3006 - RNA, 22 nt, Artificial Sequence
  Synthetic
uuucuccgguguggaagaagua

SEQ ID NO: 3007 - RNA, 20 nt, Artificial Sequence
  Synthetic
aagcugccuuacuuccucca

SEQ ID NO: 3008 - RNA, 20 nt, Artificial Sequence
  Synthetic
accuguuucuccggcgugga

SEQ ID NO: 3009 - RNA, 20 nt, Artificial Sequence
  Synthetic
acuuccuccacgccggagaa

SEQ ID NO: 3010 - RNA, 20 nt, Artificial Sequence
  Synthetic
agcugccuuacuuccuccac

SEQ ID NO: 3011 - RNA, 20 nt, Artificial Sequence
  Synthetic
aggaaguaaggcagcuuaac

SEQ ID NO: 3012 - RNA, 20 nt, Artificial Sequence
  Synthetic
auggcguuaagcugccuuac

SEQ ID NO: 3013 - RNA, 20 nt, Artificial Sequence
  Synthetic
caccuguuucuccggcgugg

SEQ ID NO: 3014 - RNA, 20 nt, Artificial Sequence
  Synthetic
ccggcguggaggaaguaagg

SEQ ID NO: 3015 - RNA, 20 nt, Artificial Sequence
  Synthetic
ccuccacgccggagaaacag

SEQ ID NO: 3016 - RNA, 20 nt, Artificial Sequence
  Synthetic
ccuguuucuccggcguggag

SEQ ID NO: 3017 - RNA, 20 nt, Artificial Sequence
  Synthetic
ccuuacuuccuccacgccgg

SEQ ID NO: 3018 - RNA, 20 nt, Artificial Sequence
  Synthetic
cggcguggaggaaguaaggc

SEQ ID NO: 3019 - RNA, 20 nt, Artificial Sequence
  Synthetic
cguggaggaaguaaggcagc

SEQ ID NO: 3020 - RNA, 20 nt, Artificial Sequence
  Synthetic
cguuaagcugccuuacuucc

SEQ ID NO: 3021 - RNA, 20 nt, Artificial Sequence
  Synthetic
cucaccuguuucuccggcgu

SEQ ID NO: 3022 - RNA, 20 nt, Artificial Sequence
  Synthetic
cuccggcguggaggaaguaa

SEQ ID NO: 3023 - RNA, 20 nt, Artificial Sequence
  Synthetic
cugccuuacuuccuccacgc

SEQ ID NO: 3024 - RNA, 20 nt, Artificial Sequence
  Synthetic
cuguuucuccggcguggagg

SEQ ID NO: 3025 - RNA, 20 nt, Artificial Sequence
  Synthetic
cuuacuuccuccacgccgga

SEQ ID NO: 3026 - RNA, 20 nt, Artificial Sequence
  Synthetic
cuuccuccacgccggagaaa

SEQ ID NO: 3027 - RNA, 20 nt, Artificial Sequence
  Synthetic
gaggaaguaaggcagcuuaa

SEQ ID NO: 3028 - RNA, 20 nt, Artificial Sequence
  Synthetic
gccuuacuuccuccacgccg

SEQ ID NO: 3029 - RNA, 20 nt, Artificial Sequence
  Synthetic
gcguggaggaaguaaggcag

SEQ ID NO: 3030 - RNA, 20 nt, Artificial Sequence
  Synthetic
gcguuaagcugccuuacuuc

SEQ ID NO: 3031 - RNA, 20 nt, Artificial Sequence
  Synthetic
gcugccuuacuuccuccacg

SEQ ID NO: 3032 - RNA, 20 nt, Artificial Sequence
  Synthetic
ggaggaaguaaggcagcuua

SEQ ID NO: 3033 - RNA, 20 nt, Artificial Sequence
  Synthetic
ggcguggaggaaguaaggca

SEQ ID NO: 3034 - RNA, 20 nt, Artificial Sequence
  Synthetic
ggcguuaagcugccuuacuu

SEQ ID NO: 3035 - RNA, 20 nt, Artificial Sequence
  Synthetic
guggaggaaguaaggcagcu

SEQ ID NO: 3036 - RNA, 20 nt, Artificial Sequence
  Synthetic
guuaagcugccuuacuuccu

SEQ ID NO: 3037 - RNA, 20 nt, Artificial Sequence
  Synthetic
guuucuccggcguggaggaa

SEQ ID NO: 3038 - RNA, 20 nt, Artificial Sequence
  Synthetic
uaagcugccuuacuuccucc

SEQ ID NO: 3039 - RNA, 20 nt, Artificial Sequence
  Synthetic
uacuuccuccacgccggaga

SEQ ID NO: 3040 - RNA, 20 nt, Artificial Sequence
  Synthetic
ucaccuguuucuccggcgug

SEQ ID NO: 3041 - RNA, 20 nt, Artificial Sequence
  Synthetic
uccggcguggaggaaguaag

SEQ ID NO: 3042 - RNA, 20 nt, Artificial Sequence
  Synthetic
uccuccacgccggagaaaca

SEQ ID NO: 3043 - RNA, 20 nt, Artificial Sequence
  Synthetic
ucuccggcguggaggaagua

SEQ ID NO: 3044 - RNA, 20 nt, Artificial Sequence
  Synthetic
ugccuuacuuccuccacgcc

SEQ ID NO: 3045 - RNA, 20 nt, Artificial Sequence
  Synthetic
uggaggaaguaaggcagcuu

SEQ ID NO: 3046 - RNA, 20 nt, Artificial Sequence
  Synthetic
uggcguuaagcugccuuacu

SEQ ID NO: 3047 - RNA, 20 nt, Artificial Sequence
  Synthetic
uguuucuccggcguggagga

SEQ ID NO: 3048 - RNA, 20 nt, Artificial Sequence
  Synthetic
uuaagcugccuuacuuccuc

SEQ ID NO: 3049 - RNA, 20 nt, Artificial Sequence
  Synthetic
uuacuuccuccacgccggag

SEQ ID NO: 3050 - RNA, 20 nt, Artificial Sequence
  Synthetic
uuccuccacgccggagaaac

SEQ ID NO: 3051 - RNA, 20 nt, Artificial Sequence
  Synthetic
uucuccggcguggaggaagu

SEQ ID NO: 3052 - RNA, 20 nt, Artificial Sequence
  Synthetic
uuucuccggcguggaggaag

SEQ ID NO: 3053 - RNA, 21 nt, Artificial Sequence
  Synthetic
aagcugccuuacuuccuccac

SEQ ID NO: 3054 - RNA, 21 nt, Artificial Sequence
  Synthetic
accuguuucuccggcguggag

SEQ ID NO: 3055 - RNA, 21 nt, Artificial Sequence
  Synthetic
acuuccuccacgccggagaaa

SEQ ID NO: 3056 - RNA, 21 nt, Artificial Sequence
  Synthetic
agcugccuuacuuccuccacg

SEQ ID NO: 3057 - RNA, 21 nt, Artificial Sequence
  Synthetic
aggaaguaaggcagcuuaacg

SEQ ID NO: 3058 - RNA, 21 nt, Artificial Sequence
  Synthetic
auggcguuaagcugccuuacu

SEQ ID NO: 3059 - RNA, 21 nt, Artificial Sequence
  Synthetic
caccuguuucuccggcgugga

SEQ ID NO: 3060 - RNA, 21 nt, Artificial Sequence
  Synthetic
ccggcguggaggaaguaaggc

SEQ ID NO: 3061 - RNA, 21 nt, Artificial Sequence
  Synthetic
ccuccacgccggagaaacagg

SEQ ID NO: 3062 - RNA, 21 nt, Artificial Sequence
  Synthetic
ccuguuucuccggcguggagg

SEQ ID NO: 3063 - RNA, 21 nt, Artificial Sequence
  Synthetic
ccuuacuuccuccacgccgga

SEQ ID NO: 3064 - RNA, 21 nt, Artificial Sequence
  Synthetic
cggcguggaggaaguaaggca

SEQ ID NO: 3065 - RNA, 21 nt, Artificial Sequence
  Synthetic
cguggaggaaguaaggcagcu

SEQ ID NO: 3066 - RNA, 21 nt, Artificial Sequence
  Synthetic
cguuaagcugccuuacuuccu

SEQ ID NO: 3067 - RNA, 21 nt, Artificial Sequence
  Synthetic
cucaccuguuucuccggcgug

SEQ ID NO: 3068 - RNA, 21 nt, Artificial Sequence
  Synthetic
cuccggcguggaggaaguaag

SEQ ID NO: 3069 - RNA, 21 nt, Artificial Sequence
  Synthetic
cugccuuacuuccuccacgcc

SEQ ID NO: 3070 - RNA, 21 nt, Artificial Sequence
  Synthetic
cuguuucuccggcguggagga

SEQ ID NO: 3071 - RNA, 21 nt, Artificial Sequence
  Synthetic
cuuacuuccuccacgccggag

SEQ ID NO: 3072 - RNA, 21 nt, Artificial Sequence
  Synthetic
cuuccuccacgccggagaaac

SEQ ID NO: 3073 - RNA, 21 nt, Artificial Sequence
  Synthetic
gaggaaguaaggcagcuuaac

SEQ ID NO: 3074 - RNA, 21 nt, Artificial Sequence
  Synthetic
gauggcguuaagcugccuuac

SEQ ID NO: 3075 - RNA, 21 nt, Artificial Sequence
  Synthetic
gccuuacuuccuccacgccgg

SEQ ID NO: 3076 - RNA, 21 nt, Artificial Sequence
  Synthetic
gcguggaggaaguaaggcagc

SEQ ID NO: 3077 - RNA, 21 nt, Artificial Sequence
  Synthetic
gcguuaagcugccuuacuucc

SEQ ID NO: 3078 - RNA, 21 nt, Artificial Sequence
  Synthetic
gcucaccuguuucuccggcgu

SEQ ID NO: 3079 - RNA, 21 nt, Artificial Sequence
  Synthetic
gcugccuuacuuccuccacgc

SEQ ID NO: 3080 - RNA, 21 nt, Artificial Sequence
  Synthetic
ggaggaaguaaggcagcuuaa

SEQ ID NO: 3081 - RNA, 21 nt, Artificial Sequence
  Synthetic
ggcguggaggaaguaaggcag

SEQ ID NO: 3082 - RNA, 21 nt, Artificial Sequence
  Synthetic
ggcguuaagcugccuuacuuc

SEQ ID NO: 3083 - RNA, 21 nt, Artificial Sequence
  Synthetic
guggaggaaguaaggcagcuu

SEQ ID NO: 3084 - RNA, 21 nt, Artificial Sequence
  Synthetic
guuaagcugccuuacuuccuc

SEQ ID NO: 3085 - RNA, 21 nt, Artificial Sequence
  Synthetic
guuucuccggcguggaggaag

SEQ ID NO: 3086 - RNA, 21 nt, Artificial Sequence
  Synthetic
uaagcugccuuacuuccucca

SEQ ID NO: 3087 - RNA, 21 nt, Artificial Sequence
  Synthetic
uacuuccuccacgccggagaa

SEQ ID NO: 3088 - RNA, 21 nt, Artificial Sequence
  Synthetic
ucaccuguuucuccggcgugg

SEQ ID NO: 3089 - RNA, 21 nt, Artificial Sequence
  Synthetic
uccggcguggaggaaguaagg

SEQ ID NO: 3090 - RNA, 21 nt, Artificial Sequence
  Synthetic
uccuccacgccggagaaacag

SEQ ID NO: 3091 - RNA, 21 nt, Artificial Sequence
  Synthetic
ucuccggcguggaggaaguaa

SEQ ID NO: 3092 - RNA, 21 nt, Artificial Sequence
  Synthetic
ugccuuacuuccuccacgccg

SEQ ID NO: 3093 - RNA, 21 nt, Artificial Sequence
  Synthetic
uggaggaaguaaggcagcuua

SEQ ID NO: 3094 - RNA, 21 nt, Artificial Sequence
  Synthetic
uggcguuaagcugccuuacuu

SEQ ID NO: 3095 - RNA, 21 nt, Artificial Sequence
  Synthetic
uguuucuccggcguggaggaa

SEQ ID NO: 3096 - RNA, 21 nt, Artificial Sequence
  Synthetic
uuaagcugccuuacuuccucc

SEQ ID NO: 3097 - RNA, 21 nt, Artificial Sequence
  Synthetic
uuacuuccuccacgccggaga

SEQ ID NO: 3098 - RNA, 21 nt, Artificial Sequence
  Synthetic
uuccuccacgccggagaaaca

SEQ ID NO: 3099 - RNA, 21 nt, Artificial Sequence
  Synthetic
uucuccggcguggaggaagua

SEQ ID NO: 3100 - RNA, 21 nt, Artificial Sequence
  Synthetic
uuucuccggcguggaggaagu

SEQ ID NO: 3101 - RNA, 22 nt, Artificial Sequence
  Synthetic
aagcugccuuacuuccuccacg

SEQ ID NO: 3102 - RNA, 22 nt, Artificial Sequence
  Synthetic
accuguuucuccggcguggagg

SEQ ID NO: 3103 - RNA, 22 nt, Artificial Sequence
  Synthetic
acuuccuccacgccggagaaac

SEQ ID NO: 3104 - RNA, 22 nt, Artificial Sequence
  Synthetic
agcugccuuacuuccuccacgc

SEQ ID NO: 3105 - RNA, 22 nt, Artificial Sequence
  Synthetic
aggaaguaaggcagcuuaacgc

SEQ ID NO: 3106 - RNA, 22 nt, Artificial Sequence
  Synthetic
auggcguuaagcugccuuacuu

SEQ ID NO: 3107 - RNA, 22 nt, Artificial Sequence
  Synthetic
caccuguuucuccggcguggag

SEQ ID NO: 3108 - RNA, 22 nt, Artificial Sequence
  Synthetic
ccggcguggaggaaguaaggca

SEQ ID NO: 3109 - RNA, 22 nt, Artificial Sequence
  Synthetic
ccuccacgccggagaaacaggu

SEQ ID NO: 3110 - RNA, 22 nt, Artificial Sequence
  Synthetic
ccuguuucuccggcguggagga

SEQ ID NO: 3111 - RNA, 22 nt, Artificial Sequence
  Synthetic
ccuuacuuccuccacgccggag

SEQ ID NO: 3112 - RNA, 22 nt, Artificial Sequence
  Synthetic
cggcguggaggaaguaaggcag

SEQ ID NO: 3113 - RNA, 22 nt, Artificial Sequence
  Synthetic
cguggaggaaguaaggcagcuu

SEQ ID NO: 3114 - RNA, 22 nt, Artificial Sequence
  Synthetic
cguuaagcugccuuacuuccuc

SEQ ID NO: 3115 - RNA, 22 nt, Artificial Sequence
  Synthetic
cucaccuguuucuccggcgugg

SEQ ID NO: 3116 - RNA, 22 nt, Artificial Sequence
  Synthetic
cuccggcguggaggaaguaagg

SEQ ID NO: 3117 - RNA, 22 nt, Artificial Sequence
  Synthetic
cugccuuacuuccuccacgccg

SEQ ID NO: 3118 - RNA, 22 nt, Artificial Sequence
  Synthetic
cuguuucuccggcguggaggaa

SEQ ID NO: 3119 - RNA, 22 nt, Artificial Sequence
  Synthetic
cuuacuuccuccacgccggaga

SEQ ID NO: 3120 - RNA, 22 nt, Artificial Sequence
  Synthetic
cuuccuccacgccggagaaaca

SEQ ID NO: 3121 - RNA, 22 nt, Artificial Sequence
  Synthetic
gaggaaguaaggcagcuuaacg

SEQ ID NO: 3122 - RNA, 22 nt, Artificial Sequence
  Synthetic
gauggcguuaagcugccuuacu

SEQ ID NO: 3123 - RNA, 22 nt, Artificial Sequence
  Synthetic
gccuuacuuccuccacgccgga

SEQ ID NO: 3124 - RNA, 22 nt, Artificial Sequence
  Synthetic
gcguggaggaaguaaggcagcu

SEQ ID NO: 3125 - RNA, 22 nt, Artificial Sequence
  Synthetic
gcguuaagcugccuuacuuccu

SEQ ID NO: 3126 - RNA, 22 nt, Artificial Sequence
  Synthetic
gcucaccuguuucuccggcgug

SEQ ID NO: 3127 - RNA, 22 nt, Artificial Sequence
  Synthetic
gcugccuuacuuccuccacgcc

SEQ ID NO: 3128 - RNA, 22 nt, Artificial Sequence
  Synthetic
ggaggaaguaaggcagcuuaac

SEQ ID NO: 3129 - RNA, 22 nt, Artificial Sequence
  Synthetic
ggauggcguuaagcugccuuac

SEQ ID NO: 3130 - RNA, 22 nt, Artificial Sequence
  Synthetic
ggcguggaggaaguaaggcagc

SEQ ID NO: 3131 - RNA, 22 nt, Artificial Sequence
  Synthetic
ggcguuaagcugccuuacuucc

SEQ ID NO: 3132 - RNA, 22 nt, Artificial Sequence
  Synthetic
ggcucaccuguuucuccggcgu

SEQ ID NO: 3133 - RNA, 22 nt, Artificial Sequence
  Synthetic
guggaggaaguaaggcagcuua

SEQ ID NO: 3134 - RNA, 22 nt, Artificial Sequence
  Synthetic
guuaagcugccuuacuuccucc

SEQ ID NO: 3135 - RNA, 22 nt, Artificial Sequence
  Synthetic
guuucuccggcguggaggaagu

SEQ ID NO: 3136 - RNA, 22 nt, Artificial Sequence
  Synthetic
uaagcugccuuacuuccuccac

SEQ ID NO: 3137 - RNA, 22 nt, Artificial Sequence
  Synthetic
uacuuccuccacgccggagaaa

SEQ ID NO: 3138 - RNA, 22 nt, Artificial Sequence
  Synthetic
ucaccuguuucuccggcgugga

SEQ ID NO: 3139 - RNA, 22 nt, Artificial Sequence
  Synthetic
uccggcguggaggaaguaaggc

SEQ ID NO: 3140 - RNA, 22 nt, Artificial Sequence
  Synthetic
uccuccacgccggagaaacagg

SEQ ID NO: 3141 - RNA, 22 nt, Artificial Sequence
  Synthetic
ucuccggcguggaggaaguaag

SEQ ID NO: 3142 - RNA, 22 nt, Artificial Sequence
  Synthetic
ugccuuacuuccuccacgccgg

SEQ ID NO: 3143 - RNA, 22 nt, Artificial Sequence
  Synthetic
uggaggaaguaaggcagcuuaa

SEQ ID NO: 3144 - RNA, 22 nt, Artificial Sequence
  Synthetic
uggcguuaagcugccuuacuuc

SEQ ID NO: 3145 - RNA, 22 nt, Artificial Sequence
  Synthetic
uguuucuccggcguggaggaag

SEQ ID NO: 3146 - RNA, 22 nt, Artificial Sequence
  Synthetic
uuaagcugccuuacuuccucca

SEQ ID NO: 3147 - RNA, 22 nt, Artificial Sequence
  Synthetic
uuacuuccuccacgccggagaa

SEQ ID NO: 3148 - RNA, 22 nt, Artificial Sequence
  Synthetic
uuccuccacgccggagaaacag

SEQ ID NO: 3149 - RNA, 22 nt, Artificial Sequence
  Synthetic
uucuccggcguggaggaaguaa

SEQ ID NO: 3150 - RNA, 22 nt, Artificial Sequence
  Synthetic
uuucuccggcguggaggaagua

SEQ ID NO: 3151 - RNA, 20 nt, Artificial Sequence
  Synthetic
aagaaguaaggcagcuuaau

SEQ ID NO: 3152 - RNA, 20 nt, Artificial Sequence
  Synthetic
aaggauggcauuaagcugcc

SEQ ID NO: 3153 - RNA, 20 nt, Artificial Sequence
  Synthetic
aaggcagcuuaaugccaucc

SEQ ID NO: 3154 - RNA, 20 nt, Artificial Sequence
  Synthetic
aaguaaggcagcuuaaugcc

SEQ ID NO: 3155 - RNA, 20 nt, Artificial Sequence
  Synthetic
aaugccauccuuggcgggga

SEQ ID NO: 3156 - RNA, 20 nt, Artificial Sequence
  Synthetic
agaaguaaggcagcuuaaug

SEQ ID NO: 3157 - RNA, 20 nt, Artificial Sequence
  Synthetic
agcuuaaugccauccuuggc

SEQ ID NO: 3158 - RNA, 20 nt, Artificial Sequence
  Synthetic
aggauggcauuaagcugccu

SEQ ID NO: 3159 - RNA, 20 nt, Artificial Sequence
  Synthetic
aggcagcuuaaugccauccu

SEQ ID NO: 3160 - RNA, 20 nt, Artificial Sequence
  Synthetic
aguaaggcagcuuaaugcca

SEQ ID NO: 3161 - RNA, 20 nt, Artificial Sequence
  Synthetic
auccccgccaaggauggcau

SEQ ID NO: 3162 - RNA, 20 nt, Artificial Sequence
  Synthetic
augauccccgccaaggaugg

SEQ ID NO: 3163 - RNA, 20 nt, Artificial Sequence
  Synthetic
augccauccuuggcggggau

SEQ ID NO: 3164 - RNA, 20 nt, Artificial Sequence
  Synthetic
auggcauuaagcugccuuac

SEQ ID NO: 3165 - RNA, 20 nt, Artificial Sequence
  Synthetic
caaggauggcauuaagcugc

SEQ ID NO: 3166 - RNA, 20 nt, Artificial Sequence
  Synthetic
cagcuuaaugccauccuugg

SEQ ID NO: 3167 - RNA, 20 nt, Artificial Sequence
  Synthetic
cauuaagcugccuuacuucu

SEQ ID NO: 3168 - RNA, 20 nt, Artificial Sequence
  Synthetic
ccaaggauggcauuaagcug

SEQ ID NO: 3169 - RNA, 20 nt, Artificial Sequence
  Synthetic
ccccgccaaggauggcauua

SEQ ID NO: 3170 - RNA, 20 nt, Artificial Sequence
  Synthetic
cccgccaaggauggcauuaa

SEQ ID NO: 3171 - RNA, 20 nt, Artificial Sequence
  Synthetic
ccgccaaggauggcauuaag

SEQ ID NO: 3172 - RNA, 20 nt, Artificial Sequence
  Synthetic
cgccaaggauggcauuaagc

SEQ ID NO: 3173 - RNA, 20 nt, Artificial Sequence
  Synthetic
cuuaaugccauccuuggcgg

SEQ ID NO: 3174 - RNA, 20 nt, Artificial Sequence
  Synthetic
gaagaaguaaggcagcuuaa

SEQ ID NO: 3175 - RNA, 20 nt, Artificial Sequence
  Synthetic
gaaguaaggcagcuuaaugc

SEQ ID NO: 3176 - RNA, 20 nt, Artificial Sequence
  Synthetic
gauccccgccaaggauggca

SEQ ID NO: 3177 - RNA, 20 nt, Artificial Sequence
  Synthetic
gaugauccccgccaaggaug

SEQ ID NO: 3178 - RNA, 20 nt, Artificial Sequence
  Synthetic
gauggcauuaagcugccuua

SEQ ID NO: 3179 - RNA, 20 nt, Artificial Sequence
  Synthetic
gcagcuuaaugccauccuug

SEQ ID NO: 3180 - RNA, 20 nt, Artificial Sequence
  Synthetic
gcauuaagcugccuuacuuc

SEQ ID NO: 3181 - RNA, 20 nt, Artificial Sequence
  Synthetic
gccaaggauggcauuaagcu

SEQ ID NO: 3182 - RNA, 20 nt, Artificial Sequence
  Synthetic
gcuuaaugccauccuuggcg

SEQ ID NO: 3183 - RNA, 20 nt, Artificial Sequence
  Synthetic
ggaagaaguaaggcagcuua

SEQ ID NO: 3184 - RNA, 20 nt, Artificial Sequence
  Synthetic
ggauggcauuaagcugccuu

SEQ ID NO: 3185 - RNA, 20 nt, Artificial Sequence
  Synthetic
ggcagcuuaaugccauccuu

SEQ ID NO: 3186 - RNA, 20 nt, Artificial Sequence
  Synthetic
ggcauuaagcugccuuacuu

SEQ ID NO: 3187 - RNA, 20 nt, Artificial Sequence
  Synthetic
guaaggcagcuuaaugccau

SEQ ID NO: 3188 - RNA, 20 nt, Artificial Sequence
  Synthetic
guggaagaaguaaggcagcu

SEQ ID NO: 3189 - RNA, 20 nt, Artificial Sequence
  Synthetic
uaaggcagcuuaaugccauc

SEQ ID NO: 3190 - RNA, 20 nt, Artificial Sequence
  Synthetic
uaaugccauccuuggcgggg

SEQ ID NO: 3191 - RNA, 20 nt, Artificial Sequence
  Synthetic
uccccgccaaggauggcauu

SEQ ID NO: 3192 - RNA, 20 nt, Artificial Sequence
  Synthetic
ugauccccgccaaggauggc

SEQ ID NO: 3193 - RNA, 20 nt, Artificial Sequence
  Synthetic
ugaugauccccgccaaggau

SEQ ID NO: 3194 - RNA, 20 nt, Artificial Sequence
  Synthetic
uggaagaaguaaggcagcuu

SEQ ID NO: 3195 - RNA, 20 nt, Artificial Sequence
  Synthetic
uggcauuaagcugccuuacu

SEQ ID NO: 3196 - RNA, 20 nt, Artificial Sequence
  Synthetic
uuaaugccauccuuggcggg

SEQ ID NO: 3197 - RNA, 21 nt, Artificial Sequence
  Synthetic
aagaaguaaggcagcuuaaug

SEQ ID NO: 3198 - RNA, 21 nt, Artificial Sequence
  Synthetic
aaggauggcauuaagcugccu

SEQ ID NO: 3199 - RNA, 21 nt, Artificial Sequence
  Synthetic
aaggcagcuuaaugccauccu

SEQ ID NO: 3200 - RNA, 21 nt, Artificial Sequence
  Synthetic
aaguaaggcagcuuaaugcca

SEQ ID NO: 3201 - RNA, 21 nt, Artificial Sequence
  Synthetic
aaugccauccuuggcggggau

SEQ ID NO: 3202 - RNA, 21 nt, Artificial Sequence
  Synthetic
agaaguaaggcagcuuaaugc

SEQ ID NO: 3203 - RNA, 21 nt, Artificial Sequence
  Synthetic
agcuuaaugccauccuuggcg

SEQ ID NO: 3204 - RNA, 21 nt, Artificial Sequence
  Synthetic
aggauggcauuaagcugccuu

SEQ ID NO: 3205 - RNA, 21 nt, Artificial Sequence
  Synthetic
aggcagcuuaaugccauccuu

SEQ ID NO: 3206 - RNA, 21 nt, Artificial Sequence
  Synthetic
aguaaggcagcuuaaugccau

SEQ ID NO: 3207 - RNA, 21 nt, Artificial Sequence
  Synthetic
auccccgccaaggauggcauu

SEQ ID NO: 3208 - RNA, 21 nt, Artificial Sequence
  Synthetic
augauccccgccaaggauggc

SEQ ID NO: 3209 - RNA, 21 nt, Artificial Sequence
  Synthetic
augccauccuuggcggggauc

SEQ ID NO: 3210 - RNA, 21 nt, Artificial Sequence
  Synthetic
auggcauuaagcugccuuacu

SEQ ID NO: 3211 - RNA, 21 nt, Artificial Sequence
  Synthetic
caaggauggcauuaagcugcc

SEQ ID NO: 3212 - RNA, 21 nt, Artificial Sequence
  Synthetic
cagcuuaaugccauccuuggc

SEQ ID NO: 3213 - RNA, 21 nt, Artificial Sequence
  Synthetic
cauuaagcugccuuacuucuu

SEQ ID NO: 3214 - RNA, 21 nt, Artificial Sequence
  Synthetic
ccaaggauggcauuaagcugc

SEQ ID NO: 3215 - RNA, 21 nt, Artificial Sequence
  Synthetic
ccccgccaaggauggcauuaa

SEQ ID NO: 3216 - RNA, 21 nt, Artificial Sequence
  Synthetic
cccgccaaggauggcauuaag

SEQ ID NO: 3217 - RNA, 21 nt, Artificial Sequence
  Synthetic
ccgccaaggauggcauuaagc

SEQ ID NO: 3218 - RNA, 21 nt, Artificial Sequence
  Synthetic
cgccaaggauggcauuaagcu

SEQ ID NO: 3219 - RNA, 21 nt, Artificial Sequence
  Synthetic
cguggaagaaguaaggcagcu

SEQ ID NO: 3220 - RNA, 21 nt, Artificial Sequence
  Synthetic
cugaugauccccgccaaggau

SEQ ID NO: 3221 - RNA, 21 nt, Artificial Sequence
  Synthetic
cuuaaugccauccuuggcggg

SEQ ID NO: 3222 - RNA, 21 nt, Artificial Sequence
  Synthetic
gaagaaguaaggcagcuuaau

SEQ ID NO: 3223 - RNA, 21 nt, Artificial Sequence
  Synthetic
gaaguaaggcagcuuaaugcc

SEQ ID NO: 3224 - RNA, 21 nt, Artificial Sequence
  Synthetic
gauccccgccaaggauggcau

SEQ ID NO: 3225 - RNA, 21 nt, Artificial Sequence
  Synthetic
gaugauccccgccaaggaugg

SEQ ID NO: 3226 - RNA, 21 nt, Artificial Sequence
  Synthetic
gauggcauuaagcugccuuac

SEQ ID NO: 3227 - RNA, 21 nt, Artificial Sequence
  Synthetic
gcagcuuaaugccauccuugg

SEQ ID NO: 3228 - RNA, 21 nt, Artificial Sequence
  Synthetic
gcauuaagcugccuuacuucu

SEQ ID NO: 3229 - RNA, 21 nt, Artificial Sequence
  Synthetic
gccaaggauggcauuaagcug

SEQ ID NO: 3230 - RNA, 21 nt, Artificial Sequence
  Synthetic
gcuuaaugccauccuuggcgg

SEQ ID NO: 3231 - RNA, 21 nt, Artificial Sequence
  Synthetic
ggaagaaguaaggcagcuuaa

SEQ ID NO: 3232 - RNA, 21 nt, Artificial Sequence
  Synthetic
ggauggcauuaagcugccuua

SEQ ID NO: 3233 - RNA, 21 nt, Artificial Sequence
  Synthetic
ggcagcuuaaugccauccuug

SEQ ID NO: 3234 - RNA, 21 nt, Artificial Sequence
  Synthetic
ggcauuaagcugccuuacuuc

SEQ ID NO: 3235 - RNA, 21 nt, Artificial Sequence
  Synthetic
guaaggcagcuuaaugccauc

SEQ ID NO: 3236 - RNA, 21 nt, Artificial Sequence
  Synthetic
guggaagaaguaaggcagcuu

SEQ ID NO: 3237 - RNA, 21 nt, Artificial Sequence
  Synthetic
uaaggcagcuuaaugccaucc

SEQ ID NO: 3238 - RNA, 21 nt, Artificial Sequence
  Synthetic
uaaugccauccuuggcgggga

SEQ ID NO: 3239 - RNA, 21 nt, Artificial Sequence
  Synthetic
uccccgccaaggauggcauua

SEQ ID NO: 3240 - RNA, 21 nt, Artificial Sequence
  Synthetic
ugauccccgccaaggauggca

SEQ ID NO: 3241 - RNA, 21 nt, Artificial Sequence
  Synthetic
ugaugauccccgccaaggaug

SEQ ID NO: 3242 - RNA, 21 nt, Artificial Sequence
  Synthetic
uggaagaaguaaggcagcuua

SEQ ID NO: 3243 - RNA, 21 nt, Artificial Sequence
  Synthetic
uggcauuaagcugccuuacuu

SEQ ID NO: 3244 - RNA, 21 nt, Artificial Sequence
  Synthetic
uuaaugccauccuuggcgggg

SEQ ID NO: 3245 - RNA, 22 nt, Artificial Sequence
  Synthetic
aagaaguaaggcagcuuaaugc

SEQ ID NO: 3246 - RNA, 22 nt, Artificial Sequence
  Synthetic
aaggauggcauuaagcugccuu

SEQ ID NO: 3247 - RNA, 22 nt, Artificial Sequence
  Synthetic
aaggcagcuuaaugccauccuu

SEQ ID NO: 3248 - RNA, 22 nt, Artificial Sequence
  Synthetic
aaguaaggcagcuuaaugccau

SEQ ID NO: 3249 - RNA, 22 nt, Artificial Sequence
  Synthetic
aaugccauccuuggcggggauc

SEQ ID NO: 3250 - RNA, 22 nt, Artificial Sequence
  Synthetic
agaaguaaggcagcuuaaugcc

SEQ ID NO: 3251 - RNA, 22 nt, Artificial Sequence
  Synthetic
agcuuaaugccauccuuggcgg

SEQ ID NO: 3252 - RNA, 22 nt, Artificial Sequence
  Synthetic
aggauggcauuaagcugccuua

SEQ ID NO: 3253 - RNA, 22 nt, Artificial Sequence
  Synthetic
aggcagcuuaaugccauccuug

SEQ ID NO: 3254 - RNA, 22 nt, Artificial Sequence
  Synthetic
aguaaggcagcuuaaugccauc

SEQ ID NO: 3255 - RNA, 22 nt, Artificial Sequence
  Synthetic
auccccgccaaggauggcauua

SEQ ID NO: 3256 - RNA, 22 nt, Artificial Sequence
  Synthetic
augauccccgccaaggauggca

SEQ ID NO: 3257 - RNA, 22 nt, Artificial Sequence
  Synthetic
augccauccuuggcggggauca

SEQ ID NO: 3258 - RNA, 22 nt, Artificial Sequence
  Synthetic
auggcauuaagcugccuuacuu

SEQ ID NO: 3259 - RNA, 22 nt, Artificial Sequence
  Synthetic
caaggauggcauuaagcugccu

SEQ ID NO: 3260 - RNA, 22 nt, Artificial Sequence
  Synthetic
cagcuuaaugccauccuuggcg

SEQ ID NO: 3261 - RNA, 22 nt, Artificial Sequence
  Synthetic
cauuaagcugccuuacuucuuc

SEQ ID NO: 3262 - RNA, 22 nt, Artificial Sequence
  Synthetic
ccaaggauggcauuaagcugcc

SEQ ID NO: 3263 - RNA, 22 nt, Artificial Sequence
  Synthetic
ccccgccaaggauggcauuaag

SEQ ID NO: 3264 - RNA, 22 nt, Artificial Sequence
  Synthetic
cccgccaaggauggcauuaagc

SEQ ID NO: 3265 - RNA, 22 nt, Artificial Sequence
  Synthetic
ccgccaaggauggcauuaagcu

SEQ ID NO: 3266 - RNA, 22 nt, Artificial Sequence
  Synthetic
cgccaaggauggcauuaagcug

SEQ ID NO: 3267 - RNA, 22 nt, Artificial Sequence
  Synthetic
cguggaagaaguaaggcagcuu

SEQ ID NO: 3268 - RNA, 22 nt, Artificial Sequence
  Synthetic
cugaugauccccgccaaggaug

SEQ ID NO: 3269 - RNA, 22 nt, Artificial Sequence
  Synthetic
cuuaaugccauccuuggcgggg

SEQ ID NO: 3270 - RNA, 22 nt, Artificial Sequence
  Synthetic
gaagaaguaaggcagcuuaaug

SEQ ID NO: 3271 - RNA, 22 nt, Artificial Sequence
  Synthetic
gaaguaaggcagcuuaaugcca

SEQ ID NO: 3272 - RNA, 22 nt, Artificial Sequence
  Synthetic
gauccccgccaaggauggcauu

SEQ ID NO: 3273 - RNA, 22 nt, Artificial Sequence
  Synthetic
gaugauccccgccaaggauggc

SEQ ID NO: 3274 - RNA, 22 nt, Artificial Sequence
  Synthetic
gauggcauuaagcugccuuacu

SEQ ID NO: 3275 - RNA, 22 nt, Artificial Sequence
  Synthetic
gcagcuuaaugccauccuuggc

SEQ ID NO: 3276 - RNA, 22 nt, Artificial Sequence
  Synthetic
gcauuaagcugccuuacuucuu

SEQ ID NO: 3277 - RNA, 22 nt, Artificial Sequence
  Synthetic
gccaaggauggcauuaagcugc

SEQ ID NO: 3278 - RNA, 22 nt, Artificial Sequence
  Synthetic
gcguggaagaaguaaggcagcu

SEQ ID NO: 3279 - RNA, 22 nt, Artificial Sequence
  Synthetic
gcuuaaugccauccuuggcggg

SEQ ID NO: 3280 - RNA, 22 nt, Artificial Sequence
  Synthetic
ggaagaaguaaggcagcuuaau

SEQ ID NO: 3281 - RNA, 22 nt, Artificial Sequence
  Synthetic
ggauggcauuaagcugccuuac

SEQ ID NO: 3282 - RNA, 22 nt, Artificial Sequence
  Synthetic
ggcagcuuaaugccauccuugg

SEQ ID NO: 3283 - RNA, 22 nt, Artificial Sequence
  Synthetic
ggcauuaagcugccuuacuucu

SEQ ID NO: 3284 - RNA, 22 nt, Artificial Sequence
  Synthetic
guaaggcagcuuaaugccaucc

SEQ ID NO: 3285 - RNA, 22 nt, Artificial Sequence
  Synthetic
guggaagaaguaaggcagcuua

SEQ ID NO: 3286 - RNA, 22 nt, Artificial Sequence
  Synthetic
uaaggcagcuuaaugccauccu

SEQ ID NO: 3287 - RNA, 22 nt, Artificial Sequence
  Synthetic
uaaugccauccuuggcggggau

SEQ ID NO: 3288 - RNA, 22 nt, Artificial Sequence
  Synthetic
uccccgccaaggauggcauuaa

SEQ ID NO: 3289 - RNA, 22 nt, Artificial Sequence
  Synthetic
ucugaugauccccgccaaggau

SEQ ID NO: 3290 - RNA, 22 nt, Artificial Sequence
  Synthetic
ugauccccgccaaggauggcau

SEQ ID NO: 3291 - RNA, 22 nt, Artificial Sequence
  Synthetic
ugaugauccccgccaaggaugg

SEQ ID NO: 3292 - RNA, 22 nt, Artificial Sequence
  Synthetic
uggaagaaguaaggcagcuuaa

SEQ ID NO: 3293 - RNA, 22 nt, Artificial Sequence
  Synthetic
uggcauuaagcugccuuacuuc

SEQ ID NO: 3294 - RNA, 22 nt, Artificial Sequence
  Synthetic
uuaaugccauccuuggcgggga

SEQ ID NO: 3295 - RNA, 20 nt, Artificial Sequence
  Synthetic
aacgccauccuuggcgagga

SEQ ID NO: 3296 - RNA, 20 nt, Artificial Sequence
  Synthetic
aagcucugaugauccucgcc

SEQ ID NO: 3297 - RNA, 20 nt, Artificial Sequence
  Synthetic
aaggaagcucugaugauccu

SEQ ID NO: 3298 - RNA, 20 nt, Artificial Sequence
  Synthetic
acaaggaagcucugaugauc

SEQ ID NO: 3299 - RNA, 20 nt, Artificial Sequence
  Synthetic
acgccauccuuggcgaggau

SEQ ID NO: 3300 - RNA, 20 nt, Artificial Sequence
  Synthetic
agcucugaugauccucgcca

SEQ ID NO: 3301 - RNA, 20 nt, Artificial Sequence
  Synthetic
agcuuaacgccauccuuggc

SEQ ID NO: 3302 - RNA, 20 nt, Artificial Sequence
  Synthetic
aggaagcucugaugauccuc

SEQ ID NO: 3303 - RNA, 20 nt, Artificial Sequence
  Synthetic
auccucgccaaggauggcgu

SEQ ID NO: 3304 - RNA, 20 nt, Artificial Sequence
  Synthetic
auccuuggcgaggaucauca

SEQ ID NO: 3305 - RNA, 20 nt, Artificial Sequence
  Synthetic
augauccucgccaaggaugg

SEQ ID NO: 3306 - RNA, 20 nt, Artificial Sequence
  Synthetic
caaggaagcucugaugaucc

SEQ ID NO: 3307 - RNA, 20 nt, Artificial Sequence
  Synthetic
cagcuuaacgccauccuugg

SEQ ID NO: 3308 - RNA, 20 nt, Artificial Sequence
  Synthetic
cauccuuggcgaggaucauc

SEQ ID NO: 3309 - RNA, 20 nt, Artificial Sequence
  Synthetic
ccauccuuggcgaggaucau

SEQ ID NO: 3310 - RNA, 20 nt, Artificial Sequence
  Synthetic
ccucgccaaggauggcguua

SEQ ID NO: 3311 - RNA, 20 nt, Artificial Sequence
  Synthetic
ccuuggcgaggaucaucaga

SEQ ID NO: 3312 - RNA, 20 nt, Artificial Sequence
  Synthetic
cgaggaucaucagagcuucc

SEQ ID NO: 3313 - RNA, 20 nt, Artificial Sequence
  Synthetic
cgccauccuuggcgaggauc

SEQ ID NO: 3314 - RNA, 20 nt, Artificial Sequence
  Synthetic
cuacaaggaagcucugauga

SEQ ID NO: 3315 - RNA, 20 nt, Artificial Sequence
  Synthetic
cucgccaaggauggcguuaa

SEQ ID NO: 3316 - RNA, 20 nt, Artificial Sequence
  Synthetic
cucugaugauccucgccaag

SEQ ID NO: 3317 - RNA, 20 nt, Artificial Sequence
  Synthetic
cugaugauccucgccaagga

SEQ ID NO: 3318 - RNA, 20 nt, Artificial Sequence
  Synthetic
cuuaacgccauccuuggcga

SEQ ID NO: 3319 - RNA, 20 nt, Artificial Sequence
  Synthetic
cuuggcgaggaucaucagag

SEQ ID NO: 3320 - RNA, 20 nt, Artificial Sequence
  Synthetic
gaagcucugaugauccucgc

SEQ ID NO: 3321 - RNA, 20 nt, Artificial Sequence
  Synthetic
gaggaucaucagagcuuccu

SEQ ID NO: 3322 - RNA, 20 nt, Artificial Sequence
  Synthetic
gauccucgccaaggauggcg

SEQ ID NO: 3323 - RNA, 20 nt, Artificial Sequence
  Synthetic
gaugauccucgccaaggaug

SEQ ID NO: 3324 - RNA, 20 nt, Artificial Sequence
  Synthetic
gcagcuuaacgccauccuug

SEQ ID NO: 3325 - RNA, 20 nt, Artificial Sequence
  Synthetic
gccauccuuggcgaggauca

SEQ ID NO: 3326 - RNA, 20 nt, Artificial Sequence
  Synthetic
gcgaggaucaucagagcuuc

SEQ ID NO: 3327 - RNA, 20 nt, Artificial Sequence
  Synthetic
gcucugaugauccucgccaa

SEQ ID NO: 3328 - RNA, 20 nt, Artificial Sequence
  Synthetic
gcuuaacgccauccuuggcg

SEQ ID NO: 3329 - RNA, 20 nt, Artificial Sequence
  Synthetic
ggaagcucugaugauccucg

SEQ ID NO: 3330 - RNA, 20 nt, Artificial Sequence
  Synthetic
ggcgaggaucaucagagcuu

SEQ ID NO: 3331 - RNA, 20 nt, Artificial Sequence
  Synthetic
uaacgccauccuuggcgagg

SEQ ID NO: 3332 - RNA, 20 nt, Artificial Sequence
  Synthetic
uacaaggaagcucugaugau

SEQ ID NO: 3333 - RNA, 20 nt, Artificial Sequence
  Synthetic
uccucgccaaggauggcguu

SEQ ID NO: 3334 - RNA, 20 nt, Artificial Sequence
  Synthetic
uccuuggcgaggaucaucag

SEQ ID NO: 3335 - RNA, 20 nt, Artificial Sequence
  Synthetic
ucugaugauccucgccaagg

SEQ ID NO: 3336 - RNA, 20 nt, Artificial Sequence
  Synthetic
ugauccucgccaaggauggc

SEQ ID NO: 3337 - RNA, 20 nt, Artificial Sequence
  Synthetic
ugaugauccucgccaaggau

SEQ ID NO: 3338 - RNA, 20 nt, Artificial Sequence
  Synthetic
uggcgaggaucaucagagcu

SEQ ID NO: 3339 - RNA, 20 nt, Artificial Sequence
  Synthetic
uuaacgccauccuuggcgag

SEQ ID NO: 3340 - RNA, 20 nt, Artificial Sequence
  Synthetic
uuggcgaggaucaucagagc

SEQ ID NO: 3341 - RNA, 21 nt, Artificial Sequence
  Synthetic
aacgccauccuuggcgaggau

SEQ ID NO: 3342 - RNA, 21 nt, Artificial Sequence
  Synthetic
aagcucugaugauccucgcca

SEQ ID NO: 3343 - RNA, 21 nt, Artificial Sequence
  Synthetic
aaggaagcucugaugauccuc

SEQ ID NO: 3344 - RNA, 21 nt, Artificial Sequence
  Synthetic
acaaggaagcucugaugaucc

SEQ ID NO: 3345 - RNA, 21 nt, Artificial Sequence
  Synthetic
acgccauccuuggcgaggauc

SEQ ID NO: 3346 - RNA, 21 nt, Artificial Sequence
  Synthetic
acuacaaggaagcucugauga

SEQ ID NO: 3347 - RNA, 21 nt, Artificial Sequence
  Synthetic
agcucugaugauccucgccaa

SEQ ID NO: 3348 - RNA, 21 nt, Artificial Sequence
  Synthetic
agcuuaacgccauccuuggcg

SEQ ID NO: 3349 - RNA, 21 nt, Artificial Sequence
  Synthetic
aggaagcucugaugauccucg

SEQ ID NO: 3350 - RNA, 21 nt, Artificial Sequence
  Synthetic
auccucgccaaggauggcguu

SEQ ID NO: 3351 - RNA, 21 nt, Artificial Sequence
  Synthetic
auccuuggcgaggaucaucag

SEQ ID NO: 3352 - RNA, 21 nt, Artificial Sequence
  Synthetic
augauccucgccaaggauggc

SEQ ID NO: 3353 - RNA, 21 nt, Artificial Sequence
  Synthetic
caaggaagcucugaugauccu

SEQ ID NO: 3354 - RNA, 21 nt, Artificial Sequence
  Synthetic
cagcuuaacgccauccuuggc

SEQ ID NO: 3355 - RNA, 21 nt, Artificial Sequence
  Synthetic
cauccuuggcgaggaucauca

SEQ ID NO: 3356 - RNA, 21 nt, Artificial Sequence
  Synthetic
ccauccuuggcgaggaucauc

SEQ ID NO: 3357 - RNA, 21 nt, Artificial Sequence
  Synthetic
ccucgccaaggauggcguuaa

SEQ ID NO: 3358 - RNA, 21 nt, Artificial Sequence
  Synthetic
ccuuggcgaggaucaucagag

SEQ ID NO: 3359 - RNA, 21 nt, Artificial Sequence
  Synthetic
cgaggaucaucagagcuuccu

SEQ ID NO: 3360 - RNA, 21 nt, Artificial Sequence
  Synthetic
cgccauccuuggcgaggauca

SEQ ID NO: 3361 - RNA, 21 nt, Artificial Sequence
  Synthetic
cuacaaggaagcucugaugau

SEQ ID NO: 3362 - RNA, 21 nt, Artificial Sequence
  Synthetic
cucgccaaggauggcguuaag

SEQ ID NO: 3363 - RNA, 21 nt, Artificial Sequence
  Synthetic
cucugaugauccucgccaagg

SEQ ID NO: 3364 - RNA, 21 nt, Artificial Sequence
  Synthetic
cugaugauccucgccaaggau

SEQ ID NO: 3365 - RNA, 21 nt, Artificial Sequence
  Synthetic
cuuaacgccauccuuggcgag

SEQ ID NO: 3366 - RNA, 21 nt, Artificial Sequence
  Synthetic
cuuggcgaggaucaucagagc

SEQ ID NO: 3367 - RNA, 21 nt, Artificial Sequence
  Synthetic
gaagcucugaugauccucgcc

SEQ ID NO: 3368 - RNA, 21 nt, Artificial Sequence
  Synthetic
gaggaucaucagagcuuccuu

SEQ ID NO: 3369 - RNA, 21 nt, Artificial Sequence
  Synthetic
gauccucgccaaggauggcgu

SEQ ID NO: 3370 - RNA, 21 nt, Artificial Sequence
  Synthetic
gaugauccucgccaaggaugg

SEQ ID NO: 3371 - RNA, 21 nt, Artificial Sequence
  Synthetic
gcagcuuaacgccauccuugg

SEQ ID NO: 3372 - RNA, 21 nt, Artificial Sequence
  Synthetic
gccauccuuggcgaggaucau

SEQ ID NO: 3373 - RNA, 21 nt, Artificial Sequence
  Synthetic
gcgaggaucaucagagcuucc

SEQ ID NO: 3374 - RNA, 21 nt, Artificial Sequence
  Synthetic
gcucugaugauccucgccaag

SEQ ID NO: 3375 - RNA, 21 nt, Artificial Sequence
  Synthetic
gcuuaacgccauccuuggcga

SEQ ID NO: 3376 - RNA, 21 nt, Artificial Sequence
  Synthetic
ggaagcucugaugauccucgc

SEQ ID NO: 3377 - RNA, 21 nt, Artificial Sequence
  Synthetic
ggcagcuuaacgccauccuug

SEQ ID NO: 3378 - RNA, 21 nt, Artificial Sequence
  Synthetic
ggcgaggaucaucagagcuuc

SEQ ID NO: 3379 - RNA, 21 nt, Artificial Sequence
  Synthetic
uaacgccauccuuggcgagga

SEQ ID NO: 3380 - RNA, 21 nt, Artificial Sequence
  Synthetic
uacaaggaagcucugaugauc

SEQ ID NO: 3381 - RNA, 21 nt, Artificial Sequence
  Synthetic
uccucgccaaggauggcguua

SEQ ID NO: 3382 - RNA, 21 nt, Artificial Sequence
  Synthetic
uccuuggcgaggaucaucaga

SEQ ID NO: 3383 - RNA, 21 nt, Artificial Sequence
  Synthetic
ucugaugauccucgccaagga

SEQ ID NO: 3384 - RNA, 21 nt, Artificial Sequence
  Synthetic
ugauccucgccaaggauggcg

SEQ ID NO: 3385 - RNA, 21 nt, Artificial Sequence
  Synthetic
ugaugauccucgccaaggaug

SEQ ID NO: 3386 - RNA, 21 nt, Artificial Sequence
  Synthetic
uggcgaggaucaucagagcuu

SEQ ID NO: 3387 - RNA, 21 nt, Artificial Sequence
  Synthetic
uuaacgccauccuuggcgagg

SEQ ID NO: 3388 - RNA, 21 nt, Artificial Sequence
  Synthetic
uuggcgaggaucaucagagcu

SEQ ID NO: 3389 - RNA, 22 nt, Artificial Sequence
  Synthetic
aacgccauccuuggcgaggauc

SEQ ID NO: 3390 - RNA, 22 nt, Artificial Sequence
  Synthetic
aagcucugaugauccucgccaa

SEQ ID NO: 3391 - RNA, 22 nt, Artificial Sequence
  Synthetic
aaggaagcucugaugauccucg

SEQ ID NO: 3392 - RNA, 22 nt, Artificial Sequence
  Synthetic
acaaggaagcucugaugauccu

SEQ ID NO: 3393 - RNA, 22 nt, Artificial Sequence
  Synthetic
acgccauccuuggcgaggauca

SEQ ID NO: 3394 - RNA, 22 nt, Artificial Sequence
  Synthetic
acuacaaggaagcucugaugau

SEQ ID NO: 3395 - RNA, 22 nt, Artificial Sequence
  Synthetic
agcucugaugauccucgccaag

SEQ ID NO: 3396 - RNA, 22 nt, Artificial Sequence
  Synthetic
agcuuaacgccauccuuggcga

SEQ ID NO: 3397 - RNA, 22 nt, Artificial Sequence
  Synthetic
aggaagcucugaugauccucgc

SEQ ID NO: 3398 - RNA, 22 nt, Artificial Sequence
  Synthetic
aggcagcuuaacgccauccuug

SEQ ID NO: 3399 - RNA, 22 nt, Artificial Sequence
  Synthetic
auccucgccaaggauggcguua

SEQ ID NO: 3400 - RNA, 22 nt, Artificial Sequence
  Synthetic
auccuuggcgaggaucaucaga

SEQ ID NO: 3401 - RNA, 22 nt, Artificial Sequence
  Synthetic
augauccucgccaaggauggcg

SEQ ID NO: 3402 - RNA, 22 nt, Artificial Sequence
  Synthetic
caaggaagcucugaugauccuc

SEQ ID NO: 3403 - RNA, 22 nt, Artificial Sequence
  Synthetic
cagcuuaacgccauccuuggcg

SEQ ID NO: 3404 - RNA, 22 nt, Artificial Sequence
  Synthetic
cauccuuggcgaggaucaucag

SEQ ID NO: 3405 - RNA, 22 nt, Artificial Sequence
  Synthetic
ccauccuuggcgaggaucauca

SEQ ID NO: 3406 - RNA, 22 nt, Artificial Sequence
  Synthetic
ccucgccaaggauggcguuaag

SEQ ID NO: 3407 - RNA, 22 nt, Artificial Sequence
  Synthetic
ccuuggcgaggaucaucagagc

SEQ ID NO: 3408 - RNA, 22 nt, Artificial Sequence
  Synthetic
cgaggaucaucagagcuuccuu

SEQ ID NO: 3409 - RNA, 22 nt, Artificial Sequence
  Synthetic
cgccauccuuggcgaggaucau

SEQ ID NO: 3410 - RNA, 22 nt, Artificial Sequence
  Synthetic
cuacaaggaagcucugaugauc

SEQ ID NO: 3411 - RNA, 22 nt, Artificial Sequence
  Synthetic
cucgccaaggauggcguuaagc

SEQ ID NO: 3412 - RNA, 22 nt, Artificial Sequence
  Synthetic
cucugaugauccucgccaagga

SEQ ID NO: 3413 - RNA, 22 nt, Artificial Sequence
  Synthetic
cugaugauccucgccaaggaug

SEQ ID NO: 3414 - RNA, 22 nt, Artificial Sequence
  Synthetic
cuuaacgccauccuuggcgagg

SEQ ID NO: 3415 - RNA, 22 nt, Artificial Sequence
  Synthetic
cuuggcgaggaucaucagagcu

SEQ ID NO: 3416 - RNA, 22 nt, Artificial Sequence
  Synthetic
gaagcucugaugauccucgcca

SEQ ID NO: 3417 - RNA, 22 nt, Artificial Sequence
  Synthetic
gacuacaaggaagcucugauga

SEQ ID NO: 3418 - RNA, 22 nt, Artificial Sequence
  Synthetic
gaggaucaucagagcuuccuug

SEQ ID NO: 3419 - RNA, 22 nt, Artificial Sequence
  Synthetic
gauccucgccaaggauggcguu

SEQ ID NO: 3420 - RNA, 22 nt, Artificial Sequence
  Synthetic
gaugauccucgccaaggauggc

SEQ ID NO: 3421 - RNA, 22 nt, Artificial Sequence
  Synthetic
gcagcuuaacgccauccuuggc

SEQ ID NO: 3422 - RNA, 22 nt, Artificial Sequence
  Synthetic
gccauccuuggcgaggaucauc

SEQ ID NO: 3423 - RNA, 22 nt, Artificial Sequence
  Synthetic
gcgaggaucaucagagcuuccu

SEQ ID NO: 3424 - RNA, 22 nt, Artificial Sequence
  Synthetic
gcucugaugauccucgccaagg

SEQ ID NO: 3425 - RNA, 22 nt, Artificial Sequence
  Synthetic
gcuuaacgccauccuuggcgag

SEQ ID NO: 3426 - RNA, 22 nt, Artificial Sequence
  Synthetic
ggaagcucugaugauccucgcc

SEQ ID NO: 3427 - RNA, 22 nt, Artificial Sequence
  Synthetic
ggcagcuuaacgccauccuugg

SEQ ID NO: 3428 - RNA, 22 nt, Artificial Sequence
  Synthetic
ggcgaggaucaucagagcuucc

SEQ ID NO: 3429 - RNA, 22 nt, Artificial Sequence
  Synthetic
uaacgccauccuuggcgaggau

SEQ ID NO: 3430 - RNA, 22 nt, Artificial Sequence
  Synthetic
uacaaggaagcucugaugaucc

SEQ ID NO: 3431 - RNA, 22 nt, Artificial Sequence
  Synthetic
uccucgccaaggauggcguuaa

SEQ ID NO: 3432 - RNA, 22 nt, Artificial Sequence
  Synthetic
uccuuggcgaggaucaucagag

SEQ ID NO: 3433 - RNA, 22 nt, Artificial Sequence
  Synthetic
ucugaugauccucgccaaggau

SEQ ID NO: 3434 - RNA, 22 nt, Artificial Sequence
  Synthetic
ugauccucgccaaggauggcgu

SEQ ID NO: 3435 - RNA, 22 nt, Artificial Sequence
  Synthetic
ugaugauccucgccaaggaugg

SEQ ID NO: 3436 - RNA, 22 nt, Artificial Sequence
  Synthetic
uggcgaggaucaucagagcuuc

SEQ ID NO: 3437 - RNA, 22 nt, Artificial Sequence
  Synthetic
uuaacgccauccuuggcgagga

SEQ ID NO: 3438 - RNA, 22 nt, Artificial Sequence
  Synthetic
uuggcgaggaucaucagagcuu

SEQ ID NO: 3439 - RNA, 20 nt, Artificial Sequence
  Synthetic
aaggaaucucugaugauccc

SEQ ID NO: 3440 - RNA, 20 nt, Artificial Sequence
  Synthetic
aaucucugaugauccccgcc

SEQ ID NO: 3441 - RNA, 20 nt, Artificial Sequence
  Synthetic
acaaggaaucucugaugauc

SEQ ID NO: 3442 - RNA, 20 nt, Artificial Sequence
  Synthetic
acuacaaggaaucucugaug

SEQ ID NO: 3443 - RNA, 20 nt, Artificial Sequence
  Synthetic
acuccuugcaugacuacaag

SEQ ID NO: 3444 - RNA, 20 nt, Artificial Sequence
  Synthetic
agagauuccuuguagucaug

SEQ ID NO: 3445 - RNA, 20 nt, Artificial Sequence
  Synthetic
agauuccuuguagucaugca

SEQ ID NO: 3446 - RNA, 20 nt, Artificial Sequence
  Synthetic
aggaaucucugaugaucccc

SEQ ID NO: 3447 - RNA, 20 nt, Artificial Sequence
  Synthetic
aucagagauuccuuguaguc

SEQ ID NO: 3448 - RNA, 20 nt, Artificial Sequence
  Synthetic
aucaucagagauuccuugua

SEQ ID NO: 3449 - RNA, 20 nt, Artificial Sequence
  Synthetic
auccuuggcggggaucauca

SEQ ID NO: 3450 - RNA, 20 nt, Artificial Sequence
  Synthetic
aucucugaugauccccgcca

SEQ ID NO: 3451 - RNA, 20 nt, Artificial Sequence
  Synthetic
augacuacaaggaaucucug

SEQ ID NO: 3452 - RNA, 20 nt, Artificial Sequence
  Synthetic
caaggaaucucugaugaucc

SEQ ID NO: 3453 - RNA, 20 nt, Artificial Sequence
  Synthetic
cagagauuccuuguagucau

SEQ ID NO: 3454 - RNA, 20 nt, Artificial Sequence
  Synthetic
caucagagauuccuuguagu

SEQ ID NO: 3455 - RNA, 20 nt, Artificial Sequence
  Synthetic
caugacuacaaggaaucucu

SEQ ID NO: 3456 - RNA, 20 nt, Artificial Sequence
  Synthetic
ccuugcaugacuacaaggaa

SEQ ID NO: 3457 - RNA, 20 nt, Artificial Sequence
  Synthetic
ccuuggcggggaucaucaga

SEQ ID NO: 3458 - RNA, 20 nt, Artificial Sequence
  Synthetic
cggggaucaucagagauucc

SEQ ID NO: 3459 - RNA, 20 nt, Artificial Sequence
  Synthetic
cuacaaggaaucucugauga

SEQ ID NO: 3460 - RNA, 20 nt, Artificial Sequence
  Synthetic
cuccuugcaugacuacaagg

SEQ ID NO: 3461 - RNA, 20 nt, Artificial Sequence
  Synthetic
cuugcaugacuacaaggaau

SEQ ID NO: 3462 - RNA, 20 nt, Artificial Sequence
  Synthetic
cuuggcggggaucaucagag

SEQ ID NO: 3463 - RNA, 20 nt, Artificial Sequence
  Synthetic
gaaucucugaugauccccgc

SEQ ID NO: 3464 - RNA, 20 nt, Artificial Sequence
  Synthetic
gacuacaaggaaucucugau

SEQ ID NO: 3465 - RNA, 20 nt, Artificial Sequence
  Synthetic
gagauuccuuguagucaugc

SEQ ID NO: 3466 - RNA, 20 nt, Artificial Sequence
  Synthetic
gaucaucagagauuccuugu

SEQ ID NO: 3467 - RNA, 20 nt, Artificial Sequence
  Synthetic
gauuccuuguagucaugcaa

SEQ ID NO: 3468 - RNA, 20 nt, Artificial Sequence
  Synthetic
gcaugacuacaaggaaucuc

SEQ ID NO: 3469 - RNA, 20 nt, Artificial Sequence
  Synthetic
gcggggaucaucagagauuc

SEQ ID NO: 3470 - RNA, 20 nt, Artificial Sequence
  Synthetic
ggaaucucugaugauccccg

SEQ ID NO: 3471 - RNA, 20 nt, Artificial Sequence
  Synthetic
ggaucaucagagauuccuug

SEQ ID NO: 3472 - RNA, 20 nt, Artificial Sequence
  Synthetic
ggcggggaucaucagagauu

SEQ ID NO: 3473 - RNA, 20 nt, Artificial Sequence
  Synthetic
gggaucaucagagauuccuu

SEQ ID NO: 3474 - RNA, 20 nt, Artificial Sequence
  Synthetic
ggggaucaucagagauuccu

SEQ ID NO: 3475 - RNA, 20 nt, Artificial Sequence
  Synthetic
uacaaggaaucucugaugau

SEQ ID NO: 3476 - RNA, 20 nt, Artificial Sequence
  Synthetic
ucagagauuccuuguaguca

SEQ ID NO: 3477 - RNA, 20 nt, Artificial Sequence
  Synthetic
ucaucagagauuccuuguag

SEQ ID NO: 3478 - RNA, 20 nt, Artificial Sequence
  Synthetic
uccuugcaugacuacaagga

SEQ ID NO: 3479 - RNA, 20 nt, Artificial Sequence
  Synthetic
uccuuggcggggaucaucag

SEQ ID NO: 3480 - RNA, 20 nt, Artificial Sequence
  Synthetic
ugacuacaaggaaucucuga

SEQ ID NO: 3481 - RNA, 20 nt, Artificial Sequence
  Synthetic
ugcaugacuacaaggaaucu

SEQ ID NO: 3482 - RNA, 20 nt, Artificial Sequence
  Synthetic
uggcggggaucaucagagau

SEQ ID NO: 3483 - RNA, 20 nt, Artificial Sequence
  Synthetic
uugcaugacuacaaggaauc

SEQ ID NO: 3484 - RNA, 20 nt, Artificial Sequence
  Synthetic
uuggcggggaucaucagaga

SEQ ID NO: 3485 - RNA, 21 nt, Artificial Sequence
  Synthetic
aaggaaucucugaugaucccc

SEQ ID NO: 3486 - RNA, 21 nt, Artificial Sequence
  Synthetic
aaucucugaugauccccgcca

SEQ ID NO: 3487 - RNA, 21 nt, Artificial Sequence
  Synthetic
acaaggaaucucugaugaucc

SEQ ID NO: 3488 - RNA, 21 nt, Artificial Sequence
  Synthetic
acuacaaggaaucucugauga

SEQ ID NO: 3489 - RNA, 21 nt, Artificial Sequence
  Synthetic
acuccuugcaugacuacaagg

SEQ ID NO: 3490 - RNA, 21 nt, Artificial Sequence
  Synthetic
agagauuccuuguagucaugc

SEQ ID NO: 3491 - RNA, 21 nt, Artificial Sequence
  Synthetic
agauuccuuguagucaugcaa

SEQ ID NO: 3492 - RNA, 21 nt, Artificial Sequence
  Synthetic
aggaaucucugaugauccccg

SEQ ID NO: 3493 - RNA, 21 nt, Artificial Sequence
  Synthetic
aucagagauuccuuguaguca

SEQ ID NO: 3494 - RNA, 21 nt, Artificial Sequence
  Synthetic
aucaucagagauuccuuguag

SEQ ID NO: 3495 - RNA, 21 nt, Artificial Sequence
  Synthetic
auccuuggcggggaucaucag

SEQ ID NO: 3496 - RNA, 21 nt, Artificial Sequence
  Synthetic
aucucugaugauccccgccaa

SEQ ID NO: 3497 - RNA, 21 nt, Artificial Sequence
  Synthetic
augacuacaaggaaucucuga

SEQ ID NO: 3498 - RNA, 21 nt, Artificial Sequence
  Synthetic
caaggaaucucugaugauccc

SEQ ID NO: 3499 - RNA, 21 nt, Artificial Sequence
  Synthetic
cacuccuugcaugacuacaag

SEQ ID NO: 3500 - RNA, 21 nt, Artificial Sequence
  Synthetic
cagagauuccuuguagucaug

SEQ ID NO: 3501 - RNA, 21 nt, Artificial Sequence
  Synthetic
caucagagauuccuuguaguc

SEQ ID NO: 3502 - RNA, 21 nt, Artificial Sequence
  Synthetic
cauccuuggcggggaucauca

SEQ ID NO: 3503 - RNA, 21 nt, Artificial Sequence
  Synthetic
caugacuacaaggaaucucug

SEQ ID NO: 3504 - RNA, 21 nt, Artificial Sequence
  Synthetic
ccuugcaugacuacaaggaau

SEQ ID NO: 3505 - RNA, 21 nt, Artificial Sequence
  Synthetic
ccuuggcggggaucaucagag

SEQ ID NO: 3506 - RNA, 21 nt, Artificial Sequence
  Synthetic
cggggaucaucagagauuccu

SEQ ID NO: 3507 - RNA, 21 nt, Artificial Sequence
  Synthetic
cuacaaggaaucucugaugau

SEQ ID NO: 3508 - RNA, 21 nt, Artificial Sequence
  Synthetic
cuccuugcaugacuacaagga

SEQ ID NO: 3509 - RNA, 21 nt, Artificial Sequence
  Synthetic
cuugcaugacuacaaggaauc

SEQ ID NO: 3510 - RNA, 21 nt, Artificial Sequence
  Synthetic
cuuggcggggaucaucagaga

SEQ ID NO: 3511 - RNA, 21 nt, Artificial Sequence
  Synthetic
gaaucucugaugauccccgcc

SEQ ID NO: 3512 - RNA, 21 nt, Artificial Sequence
  Synthetic
gacuacaaggaaucucugaug

SEQ ID NO: 3513 - RNA, 21 nt, Artificial Sequence
  Synthetic
gagauuccuuguagucaugca

SEQ ID NO: 3514 - RNA, 21 nt, Artificial Sequence
  Synthetic
gaucaucagagauuccuugua

SEQ ID NO: 3515 - RNA, 21 nt, Artificial Sequence
  Synthetic
gauuccuuguagucaugcaag

SEQ ID NO: 3516 - RNA, 21 nt, Artificial Sequence
  Synthetic
gcaugacuacaaggaaucucu

SEQ ID NO: 3517 - RNA, 21 nt, Artificial Sequence
  Synthetic
gcggggaucaucagagauucc

SEQ ID NO: 3518 - RNA, 21 nt, Artificial Sequence
  Synthetic
ggaaucucugaugauccccgc

SEQ ID NO: 3519 - RNA, 21 nt, Artificial Sequence
  Synthetic
ggaucaucagagauuccuugu

SEQ ID NO: 3520 - RNA, 21 nt, Artificial Sequence
  Synthetic
ggcggggaucaucagagauuc

SEQ ID NO: 3521 - RNA, 21 nt, Artificial Sequence
  Synthetic
gggaucaucagagauuccuug

SEQ ID NO: 3522 - RNA, 21 nt, Artificial Sequence
  Synthetic
ggggaucaucagagauuccuu

SEQ ID NO: 3523 - RNA, 21 nt, Artificial Sequence
  Synthetic
uacaaggaaucucugaugauc

SEQ ID NO: 3524 - RNA, 21 nt, Artificial Sequence
  Synthetic
ucagagauuccuuguagucau

SEQ ID NO: 3525 - RNA, 21 nt, Artificial Sequence
  Synthetic
ucaucagagauuccuuguagu

SEQ ID NO: 3526 - RNA, 21 nt, Artificial Sequence
  Synthetic
uccuugcaugacuacaaggaa

SEQ ID NO: 3527 - RNA, 21 nt, Artificial Sequence
  Synthetic
uccuuggcggggaucaucaga

SEQ ID NO: 3528 - RNA, 21 nt, Artificial Sequence
  Synthetic
ugacuacaaggaaucucugau

SEQ ID NO: 3529 - RNA, 21 nt, Artificial Sequence
  Synthetic
ugcaugacuacaaggaaucuc

SEQ ID NO: 3530 - RNA, 21 nt, Artificial Sequence
  Synthetic
uggcggggaucaucagagauu

SEQ ID NO: 3531 - RNA, 21 nt, Artificial Sequence
  Synthetic
uugcaugacuacaaggaaucu

SEQ ID NO: 3532 - RNA, 21 nt, Artificial Sequence
  Synthetic
uuggcggggaucaucagagau

SEQ ID NO: 3533 - RNA, 22 nt, Artificial Sequence
  Synthetic
aaggaaucucugaugauccccg

SEQ ID NO: 3534 - RNA, 22 nt, Artificial Sequence
  Synthetic
aaucucugaugauccccgccaa

SEQ ID NO: 3535 - RNA, 22 nt, Artificial Sequence
  Synthetic
acaaggaaucucugaugauccc

SEQ ID NO: 3536 - RNA, 22 nt, Artificial Sequence
  Synthetic
acuacaaggaaucucugaugau

SEQ ID NO: 3537 - RNA, 22 nt, Artificial Sequence
  Synthetic
acuccuugcaugacuacaagga

SEQ ID NO: 3538 - RNA, 22 nt, Artificial Sequence
  Synthetic
agagauuccuuguagucaugca

SEQ ID NO: 3539 - RNA, 22 nt, Artificial Sequence
  Synthetic
agauuccuuguagucaugcaag

SEQ ID NO: 3540 - RNA, 22 nt, Artificial Sequence
  Synthetic
aggaaucucugaugauccccgc

SEQ ID NO: 3541 - RNA, 22 nt, Artificial Sequence
  Synthetic
aucagagauuccuuguagucau

SEQ ID NO: 3542 - RNA, 22 nt, Artificial Sequence
  Synthetic
aucaucagagauuccuuguagu

SEQ ID NO: 3543 - RNA, 22 nt, Artificial Sequence
  Synthetic
auccuuggcggggaucaucaga

SEQ ID NO: 3544 - RNA, 22 nt, Artificial Sequence
  Synthetic
aucucugaugauccccgccaag

SEQ ID NO: 3545 - RNA, 22 nt, Artificial Sequence
  Synthetic
augacuacaaggaaucucugau

SEQ ID NO: 3546 - RNA, 22 nt, Artificial Sequence
  Synthetic
caaggaaucucugaugaucccc

SEQ ID NO: 3547 - RNA, 22 nt, Artificial Sequence
  Synthetic
cacuccuugcaugacuacaagg

SEQ ID NO: 3548 - RNA, 22 nt, Artificial Sequence
  Synthetic
cagagauuccuuguagucaugc

SEQ ID NO: 3549 - RNA, 22 nt, Artificial Sequence
  Synthetic
caucagagauuccuuguaguca

SEQ ID NO: 3550 - RNA, 22 nt, Artificial Sequence
  Synthetic
cauccuuggcggggaucaucag

SEQ ID NO: 3551 - RNA, 22 nt, Artificial Sequence
  Synthetic
caugacuacaaggaaucucuga

SEQ ID NO: 3552 - RNA, 22 nt, Artificial Sequence
  Synthetic
ccacuccuugcaugacuacaag

SEQ ID NO: 3553 - RNA, 22 nt, Artificial Sequence
  Synthetic
ccauccuuggcggggaucauca

SEQ ID NO: 3554 - RNA, 22 nt, Artificial Sequence
  Synthetic
ccuugcaugacuacaaggaauc

SEQ ID NO: 3555 - RNA, 22 nt, Artificial Sequence
  Synthetic
ccuuggcggggaucaucagaga

SEQ ID NO: 3556 - RNA, 22 nt, Artificial Sequence
  Synthetic
cggggaucaucagagauuccuu

SEQ ID NO: 3557 - RNA, 22 nt, Artificial Sequence
  Synthetic
cuacaaggaaucucugaugauc

SEQ ID NO: 3558 - RNA, 22 nt, Artificial Sequence
  Synthetic
cuccuugcaugacuacaaggaa

SEQ ID NO: 3559 - RNA, 22 nt, Artificial Sequence
  Synthetic
cuugcaugacuacaaggaaucu

SEQ ID NO: 3560 - RNA, 22 nt, Artificial Sequence
  Synthetic
cuuggcggggaucaucagagau

SEQ ID NO: 3561 - RNA, 22 nt, Artificial Sequence
  Synthetic
gaaucucugaugauccccgcca

SEQ ID NO: 3562 - RNA, 22 nt, Artificial Sequence
  Synthetic
gacuacaaggaaucucugauga

SEQ ID NO: 3563 - RNA, 22 nt, Artificial Sequence
  Synthetic
gagauuccuuguagucaugcaa

SEQ ID NO: 3564 - RNA, 22 nt, Artificial Sequence
  Synthetic
gaucaucagagauuccuuguag

SEQ ID NO: 3565 - RNA, 22 nt, Artificial Sequence
  Synthetic
gauuccuuguagucaugcaagg

SEQ ID NO: 3566 - RNA, 22 nt, Artificial Sequence
  Synthetic
gcaugacuacaaggaaucucug

SEQ ID NO: 3567 - RNA, 22 nt, Artificial Sequence
  Synthetic
gcggggaucaucagagauuccu

SEQ ID NO: 3568 - RNA, 22 nt, Artificial Sequence
  Synthetic
ggaaucucugaugauccccgcc

SEQ ID NO: 3569 - RNA, 22 nt, Artificial Sequence
  Synthetic
ggaucaucagagauuccuugua

SEQ ID NO: 3570 - RNA, 22 nt, Artificial Sequence
  Synthetic
ggcggggaucaucagagauucc

SEQ ID NO: 3571 - RNA, 22 nt, Artificial Sequence
  Synthetic
gggaucaucagagauuccuugu

SEQ ID NO: 3572 - RNA, 22 nt, Artificial Sequence
  Synthetic
ggggaucaucagagauuccuug

SEQ ID NO: 3573 - RNA, 22 nt, Artificial Sequence
  Synthetic
uacaaggaaucucugaugaucc

SEQ ID NO: 3574 - RNA, 22 nt, Artificial Sequence
  Synthetic
ucagagauuccuuguagucaug

SEQ ID NO: 3575 - RNA, 22 nt, Artificial Sequence
  Synthetic
ucaucagagauuccuuguaguc

SEQ ID NO: 3576 - RNA, 22 nt, Artificial Sequence
  Synthetic
uccuugcaugacuacaaggaau

SEQ ID NO: 3577 - RNA, 22 nt, Artificial Sequence
  Synthetic
uccuuggcggggaucaucagag

SEQ ID NO: 3578 - RNA, 22 nt, Artificial Sequence
  Synthetic
ugacuacaaggaaucucugaug

SEQ ID NO: 3579 - RNA, 22 nt, Artificial Sequence
  Synthetic
ugcaugacuacaaggaaucucu

SEQ ID NO: 3580 - RNA, 22 nt, Artificial Sequence
  Synthetic
uggcggggaucaucagagauuc

SEQ ID NO: 3581 - RNA, 22 nt, Artificial Sequence
  Synthetic
uugcaugacuacaaggaaucuc

SEQ ID NO: 3582 - RNA, 22 nt, Artificial Sequence
  Synthetic
uuggcggggaucaucagagauu

SEQ ID NO: 3583 - RNA, 20 nt, Artificial Sequence
  Synthetic
acacuggccacuccuugcau

SEQ ID NO: 3584 - RNA, 20 nt, Artificial Sequence
  Synthetic
acuccuugcauggcuacaag

SEQ ID NO: 3585 - RNA, 20 nt, Artificial Sequence
  Synthetic
acuggccacuccuugcaugg

SEQ ID NO: 3586 - RNA, 20 nt, Artificial Sequence
  Synthetic
agagcuuccuuguagccaug

SEQ ID NO: 3587 - RNA, 20 nt, Artificial Sequence
  Synthetic
agccaugcaaggaguggcca

SEQ ID NO: 3588 - RNA, 20 nt, Artificial Sequence
  Synthetic
agcuuccuuguagccaugca

SEQ ID NO: 3589 - RNA, 20 nt, Artificial Sequence
  Synthetic
aucagagcuuccuuguagcc

SEQ ID NO: 3590 - RNA, 20 nt, Artificial Sequence
  Synthetic
aucaucagagcuuccuugua

SEQ ID NO: 3591 - RNA, 20 nt, Artificial Sequence
  Synthetic
auggcuacaaggaagcucug

SEQ ID NO: 3592 - RNA, 20 nt, Artificial Sequence
  Synthetic
cacuccuugcauggcuacaa

SEQ ID NO: 3593 - RNA, 20 nt, Artificial Sequence
  Synthetic
cacuggccacuccuugcaug

SEQ ID NO: 3594 - RNA, 20 nt, Artificial Sequence
  Synthetic
cagagcuuccuuguagccau

SEQ ID NO: 3595 - RNA, 20 nt, Artificial Sequence
  Synthetic
caucagagcuuccuuguagc

SEQ ID NO: 3596 - RNA, 20 nt, Artificial Sequence
  Synthetic
cauggcuacaaggaagcucu

SEQ ID NO: 3597 - RNA, 20 nt, Artificial Sequence
  Synthetic
ccacuccuugcauggcuaca

SEQ ID NO: 3598 - RNA, 20 nt, Artificial Sequence
  Synthetic
ccuugcauggcuacaaggaa

SEQ ID NO: 3599 - RNA, 20 nt, Artificial Sequence
  Synthetic
ccuuguagccaugcaaggag

SEQ ID NO: 3600 - RNA, 20 nt, Artificial Sequence
  Synthetic
cuccuugcauggcuacaagg

SEQ ID NO: 3601 - RNA, 20 nt, Artificial Sequence
  Synthetic
cuggccacuccuugcauggc

SEQ ID NO: 3602 - RNA, 20 nt, Artificial Sequence
  Synthetic
cuuccuuguagccaugcaag

SEQ ID NO: 3603 - RNA, 20 nt, Artificial Sequence
  Synthetic
cuugcauggcuacaaggaag

SEQ ID NO: 3604 - RNA, 20 nt, Artificial Sequence
  Synthetic
cuuguagccaugcaaggagu

SEQ ID NO: 3605 - RNA, 20 nt, Artificial Sequence
  Synthetic
gacacuggccacuccuugca

SEQ ID NO: 3606 - RNA, 20 nt, Artificial Sequence
  Synthetic
gagcuuccuuguagccaugc

SEQ ID NO: 3607 - RNA, 20 nt, Artificial Sequence
  Synthetic
gaucaucagagcuuccuugu

SEQ ID NO: 3608 - RNA, 20 nt, Artificial Sequence
  Synthetic
gcauggcuacaaggaagcuc

SEQ ID NO: 3609 - RNA, 20 nt, Artificial Sequence
  Synthetic
gccacuccuugcauggcuac

SEQ ID NO: 3610 - RNA, 20 nt, Artificial Sequence
  Synthetic
gccaugcaaggaguggccag

SEQ ID NO: 3611 - RNA, 20 nt, Artificial Sequence
  Synthetic
gcuuccuuguagccaugcaa

SEQ ID NO: 3612 - RNA, 20 nt, Artificial Sequence
  Synthetic
ggacacuggccacuccuugc

SEQ ID NO: 3613 - RNA, 20 nt, Artificial Sequence
  Synthetic
ggaucaucagagcuuccuug

SEQ ID NO: 3614 - RNA, 20 nt, Artificial Sequence
  Synthetic
ggccacuccuugcauggcua

SEQ ID NO: 3615 - RNA, 20 nt, Artificial Sequence
  Synthetic
ggcuacaaggaagcucugau

SEQ ID NO: 3616 - RNA, 20 nt, Artificial Sequence
  Synthetic
guagccaugcaaggaguggc

SEQ ID NO: 3617 - RNA, 20 nt, Artificial Sequence
  Synthetic
uagccaugcaaggaguggcc

SEQ ID NO: 3618 - RNA, 20 nt, Artificial Sequence
  Synthetic
ucagagcuuccuuguagcca

SEQ ID NO: 3619 - RNA, 20 nt, Artificial Sequence
  Synthetic
ucaucagagcuuccuuguag

SEQ ID NO: 3620 - RNA, 20 nt, Artificial Sequence
  Synthetic
uccuugcauggcuacaagga

SEQ ID NO: 3621 - RNA, 20 nt, Artificial Sequence
  Synthetic
uccuuguagccaugcaagga

SEQ ID NO: 3622 - RNA, 20 nt, Artificial Sequence
  Synthetic
ugcauggcuacaaggaagcu

SEQ ID NO: 3623 - RNA, 20 nt, Artificial Sequence
  Synthetic
uggccacuccuugcauggcu

SEQ ID NO: 3624 - RNA, 20 nt, Artificial Sequence
  Synthetic
uggcuacaaggaagcucuga

SEQ ID NO: 3625 - RNA, 20 nt, Artificial Sequence
  Synthetic
uguagccaugcaaggagugg

SEQ ID NO: 3626 - RNA, 20 nt, Artificial Sequence
  Synthetic
uuccuuguagccaugcaagg

SEQ ID NO: 3627 - RNA, 20 nt, Artificial Sequence
  Synthetic
uugcauggcuacaaggaagc

SEQ ID NO: 3628 - RNA, 20 nt, Artificial Sequence
  Synthetic
uuguagccaugcaaggagug

SEQ ID NO: 3629 - RNA, 21 nt, Artificial Sequence
  Synthetic
acacuggccacuccuugcaug

SEQ ID NO: 3630 - RNA, 21 nt, Artificial Sequence
  Synthetic
acuccuugcauggcuacaagg

SEQ ID NO: 3631 - RNA, 21 nt, Artificial Sequence
  Synthetic
acuggccacuccuugcauggc

SEQ ID NO: 3632 - RNA, 21 nt, Artificial Sequence
  Synthetic
agagcuuccuuguagccaugc

SEQ ID NO: 3633 - RNA, 21 nt, Artificial Sequence
  Synthetic
agccaugcaaggaguggccag

SEQ ID NO: 3634 - RNA, 21 nt, Artificial Sequence
  Synthetic
agcuuccuuguagccaugcaa

SEQ ID NO: 3635 - RNA, 21 nt, Artificial Sequence
  Synthetic
aggacacuggccacuccuugc

SEQ ID NO: 3636 - RNA, 21 nt, Artificial Sequence
  Synthetic
aucagagcuuccuuguagcca

SEQ ID NO: 3637 - RNA, 21 nt, Artificial Sequence
  Synthetic
aucaucagagcuuccuuguag

SEQ ID NO: 3638 - RNA, 21 nt, Artificial Sequence
  Synthetic
auggcuacaaggaagcucuga

SEQ ID NO: 3639 - RNA, 21 nt, Artificial Sequence
  Synthetic
cacuccuugcauggcuacaag

SEQ ID NO: 3640 - RNA, 21 nt, Artificial Sequence
  Synthetic
cacuggccacuccuugcaugg

SEQ ID NO: 3641 - RNA, 21 nt, Artificial Sequence
  Synthetic
cagagcuuccuuguagccaug

SEQ ID NO: 3642 - RNA, 21 nt, Artificial Sequence
  Synthetic
caucagagcuuccuuguagcc

SEQ ID NO: 3643 - RNA, 21 nt, Artificial Sequence
  Synthetic
cauggcuacaaggaagcucug

SEQ ID NO: 3644 - RNA, 21 nt, Artificial Sequence
  Synthetic
ccacuccuugcauggcuacaa

SEQ ID NO: 3645 - RNA, 21 nt, Artificial Sequence
  Synthetic
ccuugcauggcuacaaggaag

SEQ ID NO: 3646 - RNA, 21 nt, Artificial Sequence
  Synthetic
ccuuguagccaugcaaggagu

SEQ ID NO: 3647 - RNA, 21 nt, Artificial Sequence
  Synthetic
cuccuugcauggcuacaagga

SEQ ID NO: 3648 - RNA, 21 nt, Artificial Sequence
  Synthetic
cuggccacuccuugcauggcu

SEQ ID NO: 3649 - RNA, 21 nt, Artificial Sequence
  Synthetic
cuuccuuguagccaugcaagg

SEQ ID NO: 3650 - RNA, 21 nt, Artificial Sequence
  Synthetic
cuugcauggcuacaaggaagc

SEQ ID NO: 3651 - RNA, 21 nt, Artificial Sequence
  Synthetic
cuuguagccaugcaaggagug

SEQ ID NO: 3652 - RNA, 21 nt, Artificial Sequence
  Synthetic
gacacuggccacuccuugcau

SEQ ID NO: 3653 - RNA, 21 nt, Artificial Sequence
  Synthetic
gagcuuccuuguagccaugca

SEQ ID NO: 3654 - RNA, 21 nt, Artificial Sequence
  Synthetic
gaucaucagagcuuccuugua

SEQ ID NO: 3655 - RNA, 21 nt, Artificial Sequence
  Synthetic
gcauggcuacaaggaagcucu

SEQ ID NO: 3656 - RNA, 21 nt, Artificial Sequence
  Synthetic
gccacuccuugcauggcuaca

SEQ ID NO: 3657 - RNA, 21 nt, Artificial Sequence
  Synthetic
gccaugcaaggaguggccagu

SEQ ID NO: 3658 - RNA, 21 nt, Artificial Sequence
  Synthetic
gcuuccuuguagccaugcaag

SEQ ID NO: 3659 - RNA, 21 nt, Artificial Sequence
  Synthetic
ggacacuggccacuccuugca

SEQ ID NO: 3660 - RNA, 21 nt, Artificial Sequence
  Synthetic
ggaucaucagagcuuccuugu

SEQ ID NO: 3661 - RNA, 21 nt, Artificial Sequence
  Synthetic
ggccacuccuugcauggcuac

SEQ ID NO: 3662 - RNA, 21 nt, Artificial Sequence
  Synthetic
ggcuacaaggaagcucugaug

SEQ ID NO: 3663 - RNA, 21 nt, Artificial Sequence
  Synthetic
gggaucaucagagcuuccuug

SEQ ID NO: 3664 - RNA, 21 nt, Artificial Sequence
  Synthetic
guagccaugcaaggaguggcc

SEQ ID NO: 3665 - RNA, 21 nt, Artificial Sequence
  Synthetic
uagccaugcaaggaguggcca

SEQ ID NO: 3666 - RNA, 21 nt, Artificial Sequence
  Synthetic
ucagagcuuccuuguagccau

SEQ ID NO: 3667 - RNA, 21 nt, Artificial Sequence
  Synthetic
ucaucagagcuuccuuguagc

SEQ ID NO: 3668 - RNA, 21 nt, Artificial Sequence
  Synthetic
uccuugcauggcuacaaggaa

SEQ ID NO: 3669 - RNA, 21 nt, Artificial Sequence
  Synthetic
uccuuguagccaugcaaggag

SEQ ID NO: 3670 - RNA, 21 nt, Artificial Sequence
  Synthetic
ugcauggcuacaaggaagcuc

SEQ ID NO: 3671 - RNA, 21 nt, Artificial Sequence
  Synthetic
uggccacuccuugcauggcua

SEQ ID NO: 3672 - RNA, 21 nt, Artificial Sequence
  Synthetic
uggcuacaaggaagcucugau

SEQ ID NO: 3673 - RNA, 21 nt, Artificial Sequence
  Synthetic
uguagccaugcaaggaguggc

SEQ ID NO: 3674 - RNA, 21 nt, Artificial Sequence
  Synthetic
uuccuuguagccaugcaagga

SEQ ID NO: 3675 - RNA, 21 nt, Artificial Sequence
  Synthetic
uugcauggcuacaaggaagcu

SEQ ID NO: 3676 - RNA, 21 nt, Artificial Sequence
  Synthetic
uuguagccaugcaaggagugg

SEQ ID NO: 3677 - RNA, 22 nt, Artificial Sequence
  Synthetic
acacuggccacuccuugcaugg

SEQ ID NO: 3678 - RNA, 22 nt, Artificial Sequence
  Synthetic
acuccuugcauggcuacaagga

SEQ ID NO: 3679 - RNA, 22 nt, Artificial Sequence
  Synthetic
acuggccacuccuugcauggcu

SEQ ID NO: 3680 - RNA, 22 nt, Artificial Sequence
  Synthetic
agagcuuccuuguagccaugca

SEQ ID NO: 3681 - RNA, 22 nt, Artificial Sequence
  Synthetic
agccaugcaaggaguggccagu

SEQ ID NO: 3682 - RNA, 22 nt, Artificial Sequence
  Synthetic
agcuuccuuguagccaugcaag

SEQ ID NO: 3683 - RNA, 22 nt, Artificial Sequence
  Synthetic
aggacacuggccacuccuugca

SEQ ID NO: 3684 - RNA, 22 nt, Artificial Sequence
  Synthetic
aucagagcuuccuuguagccau

SEQ ID NO: 3685 - RNA, 22 nt, Artificial Sequence
  Synthetic
aucaucagagcuuccuuguagc

SEQ ID NO: 3686 - RNA, 22 nt, Artificial Sequence
  Synthetic
auggcuacaaggaagcucugau

SEQ ID NO: 3687 - RNA, 22 nt, Artificial Sequence
  Synthetic
cacuccuugcauggcuacaagg

SEQ ID NO: 3688 - RNA, 22 nt, Artificial Sequence
  Synthetic
cacuggccacuccuugcauggc

SEQ ID NO: 3689 - RNA, 22 nt, Artificial Sequence
  Synthetic
cagagcuuccuuguagccaugc

SEQ ID NO: 3690 - RNA, 22 nt, Artificial Sequence
  Synthetic
caucagagcuuccuuguagcca

SEQ ID NO: 3691 - RNA, 22 nt, Artificial Sequence
  Synthetic
cauggcuacaaggaagcucuga

SEQ ID NO: 3692 - RNA, 22 nt, Artificial Sequence
  Synthetic
ccacuccuugcauggcuacaag

SEQ ID NO: 3693 - RNA, 22 nt, Artificial Sequence
  Synthetic
ccuugcauggcuacaaggaagc

SEQ ID NO: 3694 - RNA, 22 nt, Artificial Sequence
  Synthetic
ccuuguagccaugcaaggagug

SEQ ID NO: 3695 - RNA, 22 nt, Artificial Sequence
  Synthetic
cuccuugcauggcuacaaggaa

SEQ ID NO: 3696 - RNA, 22 nt, Artificial Sequence
  Synthetic
cuggccacuccuugcauggcua

SEQ ID NO: 3697 - RNA, 22 nt, Artificial Sequence
  Synthetic
cuuccuuguagccaugcaagga

SEQ ID NO: 3698 - RNA, 22 nt, Artificial Sequence
  Synthetic
cuugcauggcuacaaggaagcu

SEQ ID NO: 3699 - RNA, 22 nt, Artificial Sequence
  Synthetic
cuuguagccaugcaaggagugg

SEQ ID NO: 3700 - RNA, 22 nt, Artificial Sequence
  Synthetic
gacacuggccacuccuugcaug

SEQ ID NO: 3701 - RNA, 22 nt, Artificial Sequence
  Synthetic
gagcuuccuuguagccaugcaa

SEQ ID NO: 3702 - RNA, 22 nt, Artificial Sequence
  Synthetic
gaggacacuggccacuccuugc

SEQ ID NO: 3703 - RNA, 22 nt, Artificial Sequence
  Synthetic
gaucaucagagcuuccuuguag

SEQ ID NO: 3704 - RNA, 22 nt, Artificial Sequence
  Synthetic
gcauggcuacaaggaagcucug

SEQ ID NO: 3705 - RNA, 22 nt, Artificial Sequence
  Synthetic
gccacuccuugcauggcuacaa

SEQ ID NO: 3706 - RNA, 22 nt, Artificial Sequence
  Synthetic
gccaugcaaggaguggccagug

SEQ ID NO: 3707 - RNA, 22 nt, Artificial Sequence
  Synthetic
gcuuccuuguagccaugcaagg

SEQ ID NO: 3708 - RNA, 22 nt, Artificial Sequence
  Synthetic
ggacacuggccacuccuugcau

SEQ ID NO: 3709 - RNA, 22 nt, Artificial Sequence
  Synthetic
ggaucaucagagcuuccuugua

SEQ ID NO: 3710 - RNA, 22 nt, Artificial Sequence
  Synthetic
ggccacuccuugcauggcuaca

SEQ ID NO: 3711 - RNA, 22 nt, Artificial Sequence
  Synthetic
ggcuacaaggaagcucugauga

SEQ ID NO: 3712 - RNA, 22 nt, Artificial Sequence
  Synthetic
gggaucaucagagcuuccuugu

SEQ ID NO: 3713 - RNA, 22 nt, Artificial Sequence
  Synthetic
ggggaucaucagagcuuccuug

SEQ ID NO: 3714 - RNA, 22 nt, Artificial Sequence
  Synthetic
guagccaugcaaggaguggcca

SEQ ID NO: 3715 - RNA, 22 nt, Artificial Sequence
  Synthetic
uagccaugcaaggaguggccag

SEQ ID NO: 3716 - RNA, 22 nt, Artificial Sequence
  Synthetic
ucagagcuuccuuguagccaug

SEQ ID NO: 3717 - RNA, 22 nt, Artificial Sequence
  Synthetic
ucaucagagcuuccuuguagcc

SEQ ID NO: 3718 - RNA, 22 nt, Artificial Sequence
  Synthetic
uccuugcauggcuacaaggaag

SEQ ID NO: 3719 - RNA, 22 nt, Artificial Sequence
  Synthetic
uccuuguagccaugcaaggagu

SEQ ID NO: 3720 - RNA, 22 nt, Artificial Sequence
  Synthetic
ugcauggcuacaaggaagcucu

SEQ ID NO: 3721 - RNA, 22 nt, Artificial Sequence
  Synthetic
uggccacuccuugcauggcuac

SEQ ID NO: 3722 - RNA, 22 nt, Artificial Sequence
  Synthetic
uggcuacaaggaagcucugaug

SEQ ID NO: 3723 - RNA, 22 nt, Artificial Sequence
  Synthetic
uguagccaugcaaggaguggcc

SEQ ID NO: 3724 - RNA, 22 nt, Artificial Sequence
  Synthetic
uuccuuguagccaugcaaggag

SEQ ID NO: 3725 - RNA, 22 nt, Artificial Sequence
  Synthetic
uugcauggcuacaaggaagcuc

SEQ ID NO: 3726 - RNA, 22 nt, Artificial Sequence
  Synthetic
uuguagccaugcaaggaguggc

SEQ ID NO: 3727 - RNA, 20 nt, Artificial Sequence
  Synthetic
acacuggccacuccuugugu

SEQ ID NO: 3728 - RNA, 20 nt, Artificial Sequence
  Synthetic
acuccuugugugacuacaag

SEQ ID NO: 3729 - RNA, 20 nt, Artificial Sequence
  Synthetic
acuggccacuccuuguguga

SEQ ID NO: 3730 - RNA, 20 nt, Artificial Sequence
  Synthetic
agagcuuccuuguagucaca

SEQ ID NO: 3731 - RNA, 20 nt, Artificial Sequence
  Synthetic
agcuuccuuguagucacaca

SEQ ID NO: 3732 - RNA, 20 nt, Artificial Sequence
  Synthetic
aggacacuggccacuccuug

SEQ ID NO: 3733 - RNA, 20 nt, Artificial Sequence
  Synthetic
agucacacaaggaguggcca

SEQ ID NO: 3734 - RNA, 20 nt, Artificial Sequence
  Synthetic
aucagagcuuccuuguaguc

SEQ ID NO: 3735 - RNA, 20 nt, Artificial Sequence
  Synthetic
cacacaaggaguggccagug

SEQ ID NO: 3736 - RNA, 20 nt, Artificial Sequence
  Synthetic
cacuccuugugugacuacaa

SEQ ID NO: 3737 - RNA, 20 nt, Artificial Sequence
  Synthetic
cacuggccacuccuugugug

SEQ ID NO: 3738 - RNA, 20 nt, Artificial Sequence
  Synthetic
cagagcuuccuuguagucac

SEQ ID NO: 3739 - RNA, 20 nt, Artificial Sequence
  Synthetic
caucagagcuuccuuguagu

SEQ ID NO: 3740 - RNA, 20 nt, Artificial Sequence
  Synthetic
ccacuccuugugugacuaca

SEQ ID NO: 3741 - RNA, 20 nt, Artificial Sequence
  Synthetic
ccuuguagucacacaaggag

SEQ ID NO: 3742 - RNA, 20 nt, Artificial Sequence
  Synthetic
ccuugugugacuacaaggaa

SEQ ID NO: 3743 - RNA, 20 nt, Artificial Sequence
  Synthetic
cuccuugugugacuacaagg

SEQ ID NO: 3744 - RNA, 20 nt, Artificial Sequence
  Synthetic
cuggccacuccuugugugac

SEQ ID NO: 3745 - RNA, 20 nt, Artificial Sequence
  Synthetic
cuuccuuguagucacacaag

SEQ ID NO: 3746 - RNA, 20 nt, Artificial Sequence
  Synthetic
cuuguagucacacaaggagu

SEQ ID NO: 3747 - RNA, 20 nt, Artificial Sequence
  Synthetic
cuugugugacuacaaggaag

SEQ ID NO: 3748 - RNA, 20 nt, Artificial Sequence
  Synthetic
gacacuggccacuccuugug

SEQ ID NO: 3749 - RNA, 20 nt, Artificial Sequence
  Synthetic
gagcuuccuuguagucacac

SEQ ID NO: 3750 - RNA, 20 nt, Artificial Sequence
  Synthetic
gaggacacuggccacuccuu

SEQ ID NO: 3751 - RNA, 20 nt, Artificial Sequence
  Synthetic
gccacuccuugugugacuac

SEQ ID NO: 3752 - RNA, 20 nt, Artificial Sequence
  Synthetic
gcuuccuuguagucacacaa

SEQ ID NO: 3753 - RNA, 20 nt, Artificial Sequence
  Synthetic
ggacacuggccacuccuugu

SEQ ID NO: 3754 - RNA, 20 nt, Artificial Sequence
  Synthetic
ggccacuccuugugugacua

SEQ ID NO: 3755 - RNA, 20 nt, Artificial Sequence
  Synthetic
guagucacacaaggaguggc

SEQ ID NO: 3756 - RNA, 20 nt, Artificial Sequence
  Synthetic
gucacacaaggaguggccag

SEQ ID NO: 3757 - RNA, 20 nt, Artificial Sequence
  Synthetic
gugacuacaaggaagcucug

SEQ ID NO: 3758 - RNA, 20 nt, Artificial Sequence
  Synthetic
gugugacuacaaggaagcuc

SEQ ID NO: 3759 - RNA, 20 nt, Artificial Sequence
  Synthetic
uagucacacaaggaguggcc

SEQ ID NO: 3760 - RNA, 20 nt, Artificial Sequence
  Synthetic
ucacacaaggaguggccagu

SEQ ID NO: 3761 - RNA, 20 nt, Artificial Sequence
  Synthetic
ucagagcuuccuuguaguca

SEQ ID NO: 3762 - RNA, 20 nt, Artificial Sequence
  Synthetic
uccuuguagucacacaagga

SEQ ID NO: 3763 - RNA, 20 nt, Artificial Sequence
  Synthetic
uccuugugugacuacaagga

SEQ ID NO: 3764 - RNA, 20 nt, Artificial Sequence
  Synthetic
uggccacuccuugugugacu

SEQ ID NO: 3765 - RNA, 20 nt, Artificial Sequence
  Synthetic
uguagucacacaaggagugg

SEQ ID NO: 3766 - RNA, 20 nt, Artificial Sequence
  Synthetic
ugugacuacaaggaagcucu

SEQ ID NO: 3767 - RNA, 20 nt, Artificial Sequence
  Synthetic
ugugugacuacaaggaagcu

SEQ ID NO: 3768 - RNA, 20 nt, Artificial Sequence
  Synthetic
uuccuuguagucacacaagg

SEQ ID NO: 3769 - RNA, 20 nt, Artificial Sequence
  Synthetic
uuguagucacacaaggagug

SEQ ID NO: 3770 - RNA, 20 nt, Artificial Sequence
  Synthetic
uugugugacuacaaggaagc

SEQ ID NO: 3771 - RNA, 21 nt, Artificial Sequence
  Synthetic
acacuggccacuccuugugug

SEQ ID NO: 3772 - RNA, 21 nt, Artificial Sequence
  Synthetic
acuccuugugugacuacaagg

SEQ ID NO: 3773 - RNA, 21 nt, Artificial Sequence
  Synthetic
acuggccacuccuugugugac

SEQ ID NO: 3774 - RNA, 21 nt, Artificial Sequence
  Synthetic
agagcuuccuuguagucacac

SEQ ID NO: 3775 - RNA, 21 nt, Artificial Sequence
  Synthetic
agcuuccuuguagucacacaa

SEQ ID NO: 3776 - RNA, 21 nt, Artificial Sequence
  Synthetic
aggacacuggccacuccuugu

SEQ ID NO: 3777 - RNA, 21 nt, Artificial Sequence
  Synthetic
agucacacaaggaguggccag

SEQ ID NO: 3778 - RNA, 21 nt, Artificial Sequence
  Synthetic
aucagagcuuccuuguaguca

SEQ ID NO: 3779 - RNA, 21 nt, Artificial Sequence
  Synthetic
cacacaaggaguggccagugu

SEQ ID NO: 3780 - RNA, 21 nt, Artificial Sequence
  Synthetic
cacuccuugugugacuacaag

SEQ ID NO: 3781 - RNA, 21 nt, Artificial Sequence
  Synthetic
cacuggccacuccuuguguga

SEQ ID NO: 3782 - RNA, 21 nt, Artificial Sequence
  Synthetic
cagagcuuccuuguagucaca

SEQ ID NO: 3783 - RNA, 21 nt, Artificial Sequence
  Synthetic
caucagagcuuccuuguaguc

SEQ ID NO: 3784 - RNA, 21 nt, Artificial Sequence
  Synthetic
ccacuccuugugugacuacaa

SEQ ID NO: 3785 - RNA, 21 nt, Artificial Sequence
  Synthetic
ccuuguagucacacaaggagu

SEQ ID NO: 3786 - RNA, 21 nt, Artificial Sequence
  Synthetic
ccuugugugacuacaaggaag

SEQ ID NO: 3787 - RNA, 21 nt, Artificial Sequence
  Synthetic
cuccuugugugacuacaagga

SEQ ID NO: 3788 - RNA, 21 nt, Artificial Sequence
  Synthetic
cuggccacuccuugugugacu

SEQ ID NO: 3789 - RNA, 21 nt, Artificial Sequence
  Synthetic
cuuccuuguagucacacaagg

SEQ ID NO: 3790 - RNA, 21 nt, Artificial Sequence
  Synthetic
cuuguagucacacaaggagug

SEQ ID NO: 3791 - RNA, 21 nt, Artificial Sequence
  Synthetic
cuugugugacuacaaggaagc

SEQ ID NO: 3792 - RNA, 21 nt, Artificial Sequence
  Synthetic
gacacuggccacuccuugugu

SEQ ID NO: 3793 - RNA, 21 nt, Artificial Sequence
  Synthetic
gagcuuccuuguagucacaca

SEQ ID NO: 3794 - RNA, 21 nt, Artificial Sequence
  Synthetic
gaggacacuggccacuccuug

SEQ ID NO: 3795 - RNA, 21 nt, Artificial Sequence
  Synthetic
gccacuccuugugugacuaca

SEQ ID NO: 3796 - RNA, 21 nt, Artificial Sequence
  Synthetic
gcuuccuuguagucacacaag

SEQ ID NO: 3797 - RNA, 21 nt, Artificial Sequence
  Synthetic
ggacacuggccacuccuugug

SEQ ID NO: 3798 - RNA, 21 nt, Artificial Sequence
  Synthetic
ggccacuccuugugugacuac

SEQ ID NO: 3799 - RNA, 21 nt, Artificial Sequence
  Synthetic
guagucacacaaggaguggcc

SEQ ID NO: 3800 - RNA, 21 nt, Artificial Sequence
  Synthetic
gucacacaaggaguggccagu

SEQ ID NO: 3801 - RNA, 21 nt, Artificial Sequence
  Synthetic
gugacuacaaggaagcucuga

SEQ ID NO: 3802 - RNA, 21 nt, Artificial Sequence
  Synthetic
gugugacuacaaggaagcucu

SEQ ID NO: 3803 - RNA, 21 nt, Artificial Sequence
  Synthetic
uagucacacaaggaguggcca

SEQ ID NO: 3804 - RNA, 21 nt, Artificial Sequence
  Synthetic
ucacacaaggaguggccagug

SEQ ID NO: 3805 - RNA, 21 nt, Artificial Sequence
  Synthetic
ucagagcuuccuuguagucac

SEQ ID NO: 3806 - RNA, 21 nt, Artificial Sequence
  Synthetic
ucaucagagcuuccuuguagu

SEQ ID NO: 3807 - RNA, 21 nt, Artificial Sequence
  Synthetic
uccuuguagucacacaaggag

SEQ ID NO: 3808 - RNA, 21 nt, Artificial Sequence
  Synthetic
uccuugugugacuacaaggaa

SEQ ID NO: 3809 - RNA, 21 nt, Artificial Sequence
  Synthetic
ugaggacacuggccacuccuu

SEQ ID NO: 3810 - RNA, 21 nt, Artificial Sequence
  Synthetic
uggccacuccuugugugacua

SEQ ID NO: 3811 - RNA, 21 nt, Artificial Sequence
  Synthetic
uguagucacacaaggaguggc

SEQ ID NO: 3812 - RNA, 21 nt, Artificial Sequence
  Synthetic
ugugacuacaaggaagcucug

SEQ ID NO: 3813 - RNA, 21 nt, Artificial Sequence
  Synthetic
ugugugacuacaaggaagcuc

SEQ ID NO: 3814 - RNA, 21 nt, Artificial Sequence
  Synthetic
uuccuuguagucacacaagga

SEQ ID NO: 3815 - RNA, 21 nt, Artificial Sequence
  Synthetic
uuguagucacacaaggagugg

SEQ ID NO: 3816 - RNA, 21 nt, Artificial Sequence
  Synthetic
uugugugacuacaaggaagcu

SEQ ID NO: 3817 - RNA, 22 nt, Artificial Sequence
  Synthetic
acacuggccacuccuuguguga

SEQ ID NO: 3818 - RNA, 22 nt, Artificial Sequence
  Synthetic
acuccuugugugacuacaagga

SEQ ID NO: 3819 - RNA, 22 nt, Artificial Sequence
  Synthetic
acuggccacuccuugugugacu

SEQ ID NO: 3820 - RNA, 22 nt, Artificial Sequence
  Synthetic
agagcuuccuuguagucacaca

SEQ ID NO: 3821 - RNA, 22 nt, Artificial Sequence
  Synthetic
agcuuccuuguagucacacaag

SEQ ID NO: 3822 - RNA, 22 nt, Artificial Sequence
  Synthetic
aggacacuggccacuccuugug

SEQ ID NO: 3823 - RNA, 22 nt, Artificial Sequence
  Synthetic
agucacacaaggaguggccagu

SEQ ID NO: 3824 - RNA, 22 nt, Artificial Sequence
  Synthetic
aucagagcuuccuuguagucac

SEQ ID NO: 3825 - RNA, 22 nt, Artificial Sequence
  Synthetic
aucaucagagcuuccuuguagu

SEQ ID NO: 3826 - RNA, 22 nt, Artificial Sequence
  Synthetic
augaggacacuggccacuccuu

SEQ ID NO: 3827 - RNA, 22 nt, Artificial Sequence
  Synthetic
cacacaaggaguggccaguguc

SEQ ID NO: 3828 - RNA, 22 nt, Artificial Sequence
  Synthetic
cacuccuugugugacuacaagg

SEQ ID NO: 3829 - RNA, 22 nt, Artificial Sequence
  Synthetic
cacuggccacuccuugugugac

SEQ ID NO: 3830 - RNA, 22 nt, Artificial Sequence
  Synthetic
cagagcuuccuuguagucacac

SEQ ID NO: 3831 - RNA, 22 nt, Artificial Sequence
  Synthetic
caucagagcuuccuuguaguca

SEQ ID NO: 3832 - RNA, 22 nt, Artificial Sequence
  Synthetic
ccacuccuugugugacuacaag

SEQ ID NO: 3833 - RNA, 22 nt, Artificial Sequence
  Synthetic
ccuuguagucacacaaggagug

SEQ ID NO: 3834 - RNA, 22 nt, Artificial Sequence
  Synthetic
ccuugugugacuacaaggaagc

SEQ ID NO: 3835 - RNA, 22 nt, Artificial Sequence
  Synthetic
cuccuugugugacuacaaggaa

SEQ ID NO: 3836 - RNA, 22 nt, Artificial Sequence
  Synthetic
cuggccacuccuugugugacua

SEQ ID NO: 3837 - RNA, 22 nt, Artificial Sequence
  Synthetic
cuuccuuguagucacacaagga

SEQ ID NO: 3838 - RNA, 22 nt, Artificial Sequence
  Synthetic
cuuguagucacacaaggagugg

SEQ ID NO: 3839 - RNA, 22 nt, Artificial Sequence
  Synthetic
cuugugugacuacaaggaagcu

SEQ ID NO: 3840 - RNA, 22 nt, Artificial Sequence
  Synthetic
gacacuggccacuccuugugug

SEQ ID NO: 3841 - RNA, 22 nt, Artificial Sequence
  Synthetic
gagcuuccuuguagucacacaa

SEQ ID NO: 3842 - RNA, 22 nt, Artificial Sequence
  Synthetic
gaggacacuggccacuccuugu

SEQ ID NO: 3843 - RNA, 22 nt, Artificial Sequence
  Synthetic
gccacuccuugugugacuacaa

SEQ ID NO: 3844 - RNA, 22 nt, Artificial Sequence
  Synthetic
gcuuccuuguagucacacaagg

SEQ ID NO: 3845 - RNA, 22 nt, Artificial Sequence
  Synthetic
ggacacuggccacuccuugugu

SEQ ID NO: 3846 - RNA, 22 nt, Artificial Sequence
  Synthetic
ggccacuccuugugugacuaca

SEQ ID NO: 3847 - RNA, 22 nt, Artificial Sequence
  Synthetic
guagucacacaaggaguggcca

SEQ ID NO: 3848 - RNA, 22 nt, Artificial Sequence
  Synthetic
gucacacaaggaguggccagug

SEQ ID NO: 3849 - RNA, 22 nt, Artificial Sequence
  Synthetic
gugacuacaaggaagcucugau

SEQ ID NO: 3850 - RNA, 22 nt, Artificial Sequence
  Synthetic
gugugacuacaaggaagcucug

SEQ ID NO: 3851 - RNA, 22 nt, Artificial Sequence
  Synthetic
uagucacacaaggaguggccag

SEQ ID NO: 3852 - RNA, 22 nt, Artificial Sequence
  Synthetic
ucacacaaggaguggccagugu

SEQ ID NO: 3853 - RNA, 22 nt, Artificial Sequence
  Synthetic
ucagagcuuccuuguagucaca

SEQ ID NO: 3854 - RNA, 22 nt, Artificial Sequence
  Synthetic
ucaucagagcuuccuuguaguc

SEQ ID NO: 3855 - RNA, 22 nt, Artificial Sequence
  Synthetic
uccuuguagucacacaaggagu

SEQ ID NO: 3856 - RNA, 22 nt, Artificial Sequence
  Synthetic
uccuugugugacuacaaggaag

SEQ ID NO: 3857 - RNA, 22 nt, Artificial Sequence
  Synthetic
ugaggacacuggccacuccuug

SEQ ID NO: 3858 - RNA, 22 nt, Artificial Sequence
  Synthetic
uggccacuccuugugugacuac

SEQ ID NO: 3859 - RNA, 22 nt, Artificial Sequence
  Synthetic
uguagucacacaaggaguggcc

SEQ ID NO: 3860 - RNA, 22 nt, Artificial Sequence
  Synthetic
ugugacuacaaggaagcucuga

SEQ ID NO: 3861 - RNA, 22 nt, Artificial Sequence
  Synthetic
ugugugacuacaaggaagcucu

SEQ ID NO: 3862 - RNA, 22 nt, Artificial Sequence
  Synthetic
uuccuuguagucacacaaggag

SEQ ID NO: 3863 - RNA, 22 nt, Artificial Sequence
  Synthetic
uuguagucacacaaggaguggc

SEQ ID NO: 3864 - RNA, 22 nt, Artificial Sequence
  Synthetic
uugugugacuacaaggaagcuc

SEQ ID NO: 3865 - RNA, 20 nt, Artificial Sequence
  Synthetic
acacaaggaguggccagugu

SEQ ID NO: 3866 - RNA, 20 nt, Artificial Sequence
  Synthetic
ugaggacacuggccacuccu

SEQ ID NO: 3867 - RNA, 21 nt, Artificial Sequence
  Synthetic
acacaaggaguggccaguguc

SEQ ID NO: 3868 - RNA, 21 nt, Artificial Sequence
  Synthetic
augaggacacuggccacuccu

SEQ ID NO: 3869 - RNA, 22 nt, Artificial Sequence
  Synthetic
acacaaggaguggccagugucc

SEQ ID NO: 3870 - RNA, 22 nt, Artificial Sequence
  Synthetic
caugaggacacuggccacuccu

SEQ ID NO: 3871 - RNA, 20 nt, Artificial Sequence
  Synthetic
aaggaguggccagugucguc

SEQ ID NO: 3872 - RNA, 20 nt, Artificial Sequence
  Synthetic
acgacacuggccacuccuug

SEQ ID NO: 3873 - RNA, 20 nt, Artificial Sequence
  Synthetic
aggaguggccagugucguca

SEQ ID NO: 3874 - RNA, 20 nt, Artificial Sequence
  Synthetic
agguggggcaugacgacacu

SEQ ID NO: 3875 - RNA, 20 nt, Artificial Sequence
  Synthetic
aguggccagugucgucaugc

SEQ ID NO: 3876 - RNA, 20 nt, Artificial Sequence
  Synthetic
agugucgucaugccccaccu

SEQ ID NO: 3877 - RNA, 20 nt, Artificial Sequence
  Synthetic
augacgacacuggccacucc

SEQ ID NO: 3878 - RNA, 20 nt, Artificial Sequence
  Synthetic
augcaaggaguggccagugu

SEQ ID NO: 3879 - RNA, 20 nt, Artificial Sequence
  Synthetic
caaggaguggccagugucgu

SEQ ID NO: 3880 - RNA, 20 nt, Artificial Sequence
  Synthetic
cagguggggcaugacgacac

SEQ ID NO: 3881 - RNA, 20 nt, Artificial Sequence
  Synthetic
cagugucgucaugccccacc

SEQ ID NO: 3882 - RNA, 20 nt, Artificial Sequence
  Synthetic
caugacgacacuggccacuc

SEQ ID NO: 3883 - RNA, 20 nt, Artificial Sequence
  Synthetic
caugcaaggaguggccagug

SEQ ID NO: 3884 - RNA, 20 nt, Artificial Sequence
  Synthetic
ccagugucgucaugccccac

SEQ ID NO: 3885 - RNA, 20 nt, Artificial Sequence
  Synthetic
ccugcagguggggcaugacg

SEQ ID NO: 3886 - RNA, 20 nt, Artificial Sequence
  Synthetic
cgucaugccccaccugcagg

SEQ ID NO: 3887 - RNA, 20 nt, Artificial Sequence
  Synthetic
cugcagguggggcaugacga

SEQ ID NO: 3888 - RNA, 20 nt, Artificial Sequence
  Synthetic
cuguccugcagguggggcau

SEQ ID NO: 3889 - RNA, 20 nt, Artificial Sequence
  Synthetic
gacgacacuggccacuccuu

SEQ ID NO: 3890 - RNA, 20 nt, Artificial Sequence
  Synthetic
gaguggccagugucgucaug

SEQ ID NO: 3891 - RNA, 20 nt, Artificial Sequence
  Synthetic
gcaaggaguggccagugucg

SEQ ID NO: 3892 - RNA, 20 nt, Artificial Sequence
  Synthetic
gcagguggggcaugacgaca

SEQ ID NO: 3893 - RNA, 20 nt, Artificial Sequence
  Synthetic
gcaugacgacacuggccacu

SEQ ID NO: 3894 - RNA, 20 nt, Artificial Sequence
  Synthetic
gccagugucgucaugcccca

SEQ ID NO: 3895 - RNA, 20 nt, Artificial Sequence
  Synthetic
ggaguggccagugucgucau

SEQ ID NO: 3896 - RNA, 20 nt, Artificial Sequence
  Synthetic
ggcaugacgacacuggccac

SEQ ID NO: 3897 - RNA, 20 nt, Artificial Sequence
  Synthetic
ggccagugucgucaugcccc

SEQ ID NO: 3898 - RNA, 20 nt, Artificial Sequence
  Synthetic
gggcaugacgacacuggcca

SEQ ID NO: 3899 - RNA, 20 nt, Artificial Sequence
  Synthetic
ggggcaugacgacacuggcc

SEQ ID NO: 3900 - RNA, 20 nt, Artificial Sequence
  Synthetic
gguggggcaugacgacacug

SEQ ID NO: 3901 - RNA, 20 nt, Artificial Sequence
  Synthetic
guccugcagguggggcauga

SEQ ID NO: 3902 - RNA, 20 nt, Artificial Sequence
  Synthetic
gucgucaugccccaccugca

SEQ ID NO: 3903 - RNA, 20 nt, Artificial Sequence
  Synthetic
guggccagugucgucaugcc

SEQ ID NO: 3904 - RNA, 20 nt, Artificial Sequence
  Synthetic
guggggcaugacgacacugg

SEQ ID NO: 3905 - RNA, 20 nt, Artificial Sequence
  Synthetic
gugucgucaugccccaccug

SEQ ID NO: 3906 - RNA, 20 nt, Artificial Sequence
  Synthetic
ucaugcaaggaguggccagu

SEQ ID NO: 3907 - RNA, 20 nt, Artificial Sequence
  Synthetic
uccugcagguggggcaugac

SEQ ID NO: 3908 - RNA, 20 nt, Artificial Sequence
  Synthetic
ucgucaugccccaccugcag

SEQ ID NO: 3909 - RNA, 20 nt, Artificial Sequence
  Synthetic
ucuguccugcagguggggca

SEQ ID NO: 3910 - RNA, 20 nt, Artificial Sequence
  Synthetic
ugacgacacuggccacuccu

SEQ ID NO: 3911 - RNA, 20 nt, Artificial Sequence
  Synthetic
ugcaaggaguggccaguguc

SEQ ID NO: 3912 - RNA, 20 nt, Artificial Sequence
  Synthetic
ugcagguggggcaugacgac

SEQ ID NO: 3913 - RNA, 20 nt, Artificial Sequence
  Synthetic
uggccagugucgucaugccc

SEQ ID NO: 3914 - RNA, 20 nt, Artificial Sequence
  Synthetic
uggggcaugacgacacuggc

SEQ ID NO: 3915 - RNA, 20 nt, Artificial Sequence
  Synthetic
uguccugcagguggggcaug

SEQ ID NO: 3916 - RNA, 20 nt, Artificial Sequence
  Synthetic
ugucgucaugccccaccugc

SEQ ID NO: 3917 - RNA, 21 nt, Artificial Sequence
  Synthetic
aaggaguggccagugucguca

SEQ ID NO: 3918 - RNA, 21 nt, Artificial Sequence
  Synthetic
acgacacuggccacuccuugc

SEQ ID NO: 3919 - RNA, 21 nt, Artificial Sequence
  Synthetic
aggaguggccagugucgucau

SEQ ID NO: 3920 - RNA, 21 nt, Artificial Sequence
  Synthetic
agguggggcaugacgacacug

SEQ ID NO: 3921 - RNA, 21 nt, Artificial Sequence
  Synthetic
aguggccagugucgucaugcc

SEQ ID NO: 3922 - RNA, 21 nt, Artificial Sequence
  Synthetic
agugucgucaugccccaccug

SEQ ID NO: 3923 - RNA, 21 nt, Artificial Sequence
  Synthetic
augacgacacuggccacuccu

SEQ ID NO: 3924 - RNA, 21 nt, Artificial Sequence
  Synthetic
augcaaggaguggccaguguc

SEQ ID NO: 3925 - RNA, 21 nt, Artificial Sequence
  Synthetic
caaggaguggccagugucguc

SEQ ID NO: 3926 - RNA, 21 nt, Artificial Sequence
  Synthetic
cagguggggcaugacgacacu

SEQ ID NO: 3927 - RNA, 21 nt, Artificial Sequence
  Synthetic
cagugucgucaugccccaccu

SEQ ID NO: 3928 - RNA, 21 nt, Artificial Sequence
  Synthetic
caugacgacacuggccacucc

SEQ ID NO: 3929 - RNA, 21 nt, Artificial Sequence
  Synthetic
caugcaaggaguggccagugu

SEQ ID NO: 3930 - RNA, 21 nt, Artificial Sequence
  Synthetic
ccagugucgucaugccccacc

SEQ ID NO: 3931 - RNA, 21 nt, Artificial Sequence
  Synthetic
ccugcagguggggcaugacga

SEQ ID NO: 3932 - RNA, 21 nt, Artificial Sequence
  Synthetic
cgucaugccccaccugcagga

SEQ ID NO: 3933 - RNA, 21 nt, Artificial Sequence
  Synthetic
cucuguccugcagguggggca

SEQ ID NO: 3934 - RNA, 21 nt, Artificial Sequence
  Synthetic
cugcagguggggcaugacgac

SEQ ID NO: 3935 - RNA, 21 nt, Artificial Sequence
  Synthetic
cuguccugcagguggggcaug

SEQ ID NO: 3936 - RNA, 21 nt, Artificial Sequence
  Synthetic
gacgacacuggccacuccuug

SEQ ID NO: 3937 - RNA, 21 nt, Artificial Sequence
  Synthetic
gaguggccagugucgucaugc

SEQ ID NO: 3938 - RNA, 21 nt, Artificial Sequence
  Synthetic
gcaaggaguggccagugucgu

SEQ ID NO: 3939 - RNA, 21 nt, Artificial Sequence
  Synthetic
gcagguggggcaugacgacac

SEQ ID NO: 3940 - RNA, 21 nt, Artificial Sequence
  Synthetic
gcaugacgacacuggccacuc

SEQ ID NO: 3941 - RNA, 21 nt, Artificial Sequence
  Synthetic
gccagugucgucaugccccac

SEQ ID NO: 3942 - RNA, 21 nt, Artificial Sequence
  Synthetic
ggaguggccagugucgucaug

SEQ ID NO: 3943 - RNA, 21 nt, Artificial Sequence
  Synthetic
ggcaugacgacacuggccacu

SEQ ID NO: 3944 - RNA, 21 nt, Artificial Sequence
  Synthetic
ggccagugucgucaugcccca

SEQ ID NO: 3945 - RNA, 21 nt, Artificial Sequence
  Synthetic
gggcaugacgacacuggccac

SEQ ID NO: 3946 - RNA, 21 nt, Artificial Sequence
  Synthetic
ggggcaugacgacacuggcca

SEQ ID NO: 3947 - RNA, 21 nt, Artificial Sequence
  Synthetic
gguggggcaugacgacacugg

SEQ ID NO: 3948 - RNA, 21 nt, Artificial Sequence
  Synthetic
gucaugcaaggaguggccagu

SEQ ID NO: 3949 - RNA, 21 nt, Artificial Sequence
  Synthetic
guccugcagguggggcaugac

SEQ ID NO: 3950 - RNA, 21 nt, Artificial Sequence
  Synthetic
gucgucaugccccaccugcag

SEQ ID NO: 3951 - RNA, 21 nt, Artificial Sequence
  Synthetic
guggccagugucgucaugccc

SEQ ID NO: 3952 - RNA, 21 nt, Artificial Sequence
  Synthetic
guggggcaugacgacacuggc

SEQ ID NO: 3953 - RNA, 21 nt, Artificial Sequence
  Synthetic
gugucgucaugccccaccugc

SEQ ID NO: 3954 - RNA, 21 nt, Artificial Sequence
  Synthetic
ucaugcaaggaguggccagug

SEQ ID NO: 3955 - RNA, 21 nt, Artificial Sequence
  Synthetic
uccugcagguggggcaugacg

SEQ ID NO: 3956 - RNA, 21 nt, Artificial Sequence
  Synthetic
ucgucaugccccaccugcagg

SEQ ID NO: 3957 - RNA, 21 nt, Artificial Sequence
  Synthetic
ucuguccugcagguggggcau

SEQ ID NO: 3958 - RNA, 21 nt, Artificial Sequence
  Synthetic
ugacgacacuggccacuccuu

SEQ ID NO: 3959 - RNA, 21 nt, Artificial Sequence
  Synthetic
ugcaaggaguggccagugucg

SEQ ID NO: 3960 - RNA, 21 nt, Artificial Sequence
  Synthetic
ugcagguggggcaugacgaca

SEQ ID NO: 3961 - RNA, 21 nt, Artificial Sequence
  Synthetic
uggccagugucgucaugcccc

SEQ ID NO: 3962 - RNA, 21 nt, Artificial Sequence
  Synthetic
uggggcaugacgacacuggcc

SEQ ID NO: 3963 - RNA, 21 nt, Artificial Sequence
  Synthetic
uguccugcagguggggcauga

SEQ ID NO: 3964 - RNA, 21 nt, Artificial Sequence
  Synthetic
ugucgucaugccccaccugca

SEQ ID NO: 3965 - RNA, 22 nt, Artificial Sequence
  Synthetic
aaggaguggccagugucgucau

SEQ ID NO: 3966 - RNA, 22 nt, Artificial Sequence
  Synthetic
acgacacuggccacuccuugca

SEQ ID NO: 3967 - RNA, 22 nt, Artificial Sequence
  Synthetic
aggaguggccagugucgucaug

SEQ ID NO: 3968 - RNA, 22 nt, Artificial Sequence
  Synthetic
agguggggcaugacgacacugg

SEQ ID NO: 3969 - RNA, 22 nt, Artificial Sequence
  Synthetic
agucaugcaaggaguggccagu

SEQ ID NO: 3970 - RNA, 22 nt, Artificial Sequence
  Synthetic
aguggccagugucgucaugccc

SEQ ID NO: 3971 - RNA, 22 nt, Artificial Sequence
  Synthetic
agugucgucaugccccaccugc

SEQ ID NO: 3972 - RNA, 22 nt, Artificial Sequence
  Synthetic
augacgacacuggccacuccuu

SEQ ID NO: 3973 - RNA, 22 nt, Artificial Sequence
  Synthetic
augcaaggaguggccagugucg

SEQ ID NO: 3974 - RNA, 22 nt, Artificial Sequence
  Synthetic
caaggaguggccagugucguca

SEQ ID NO: 3975 - RNA, 22 nt, Artificial Sequence
  Synthetic
cagguggggcaugacgacacug

SEQ ID NO: 3976 - RNA, 22 nt, Artificial Sequence
  Synthetic
cagugucgucaugccccaccug

SEQ ID NO: 3977 - RNA, 22 nt, Artificial Sequence
  Synthetic
caugacgacacuggccacuccu

SEQ ID NO: 3978 - RNA, 22 nt, Artificial Sequence
  Synthetic
caugcaaggaguggccaguguc

SEQ ID NO: 3979 - RNA, 22 nt, Artificial Sequence
  Synthetic
ccagugucgucaugccccaccu

SEQ ID NO: 3980 - RNA, 22 nt, Artificial Sequence
  Synthetic
ccugcagguggggcaugacgac

SEQ ID NO: 3981 - RNA, 22 nt, Artificial Sequence
  Synthetic
cgucaugccccaccugcaggac

SEQ ID NO: 3982 - RNA, 22 nt, Artificial Sequence
  Synthetic
cucuguccugcagguggggcau

SEQ ID NO: 3983 - RNA, 22 nt, Artificial Sequence
  Synthetic
cugcagguggggcaugacgaca

SEQ ID NO: 3984 - RNA, 22 nt, Artificial Sequence
  Synthetic
cuguccugcagguggggcauga

SEQ ID NO: 3985 - RNA, 22 nt, Artificial Sequence
  Synthetic
gacgacacuggccacuccuugc

SEQ ID NO: 3986 - RNA, 22 nt, Artificial Sequence
  Synthetic
gaguggccagugucgucaugcc

SEQ ID NO: 3987 - RNA, 22 nt, Artificial Sequence
  Synthetic
gcaaggaguggccagugucguc

SEQ ID NO: 3988 - RNA, 22 nt, Artificial Sequence
  Synthetic
gcagguggggcaugacgacacu

SEQ ID NO: 3989 - RNA, 22 nt, Artificial Sequence
  Synthetic
gcaugacgacacuggccacucc

SEQ ID NO: 3990 - RNA, 22 nt, Artificial Sequence
  Synthetic
gccagugucgucaugccccacc

SEQ ID NO: 3991 - RNA, 22 nt, Artificial Sequence
  Synthetic
ggaguggccagugucgucaugc

SEQ ID NO: 3992 - RNA, 22 nt, Artificial Sequence
  Synthetic
ggcaugacgacacuggccacuc

SEQ ID NO: 3993 - RNA, 22 nt, Artificial Sequence
  Synthetic
ggccagugucgucaugccccac

SEQ ID NO: 3994 - RNA, 22 nt, Artificial Sequence
  Synthetic
gggcaugacgacacuggccacu

SEQ ID NO: 3995 - RNA, 22 nt, Artificial Sequence
  Synthetic
ggggcaugacgacacuggccac

SEQ ID NO: 3996 - RNA, 22 nt, Artificial Sequence
  Synthetic
gguggggcaugacgacacuggc

SEQ ID NO: 3997 - RNA, 22 nt, Artificial Sequence
  Synthetic
gucaugcaaggaguggccagug

SEQ ID NO: 3998 - RNA, 22 nt, Artificial Sequence
  Synthetic
guccugcagguggggcaugacg

SEQ ID NO: 3999 - RNA, 22 nt, Artificial Sequence
  Synthetic
gucgucaugccccaccugcagg

SEQ ID NO: 4000 - RNA, 22 nt, Artificial Sequence
  Synthetic
guggccagugucgucaugcccc

SEQ ID NO: 4001 - RNA, 22 nt, Artificial Sequence
  Synthetic
guggggcaugacgacacuggcc

SEQ ID NO: 4002 - RNA, 22 nt, Artificial Sequence
  Synthetic
gugucgucaugccccaccugca

SEQ ID NO: 4003 - RNA, 22 nt, Artificial Sequence
  Synthetic
ucaugcaaggaguggccagugu

SEQ ID NO: 4004 - RNA, 22 nt, Artificial Sequence
  Synthetic
uccugcagguggggcaugacga

SEQ ID NO: 4005 - RNA, 22 nt, Artificial Sequence
  Synthetic
ucgucaugccccaccugcagga

SEQ ID NO: 4006 - RNA, 22 nt, Artificial Sequence
  Synthetic
ucucuguccugcagguggggca

SEQ ID NO: 4007 - RNA, 22 nt, Artificial Sequence
  Synthetic
ucuguccugcagguggggcaug

SEQ ID NO: 4008 - RNA, 22 nt, Artificial Sequence
  Synthetic
ugacgacacuggccacuccuug

SEQ ID NO: 4009 - RNA, 22 nt, Artificial Sequence
  Synthetic
ugcaaggaguggccagugucgu

SEQ ID NO: 4010 - RNA, 22 nt, Artificial Sequence
  Synthetic
ugcagguggggcaugacgacac

SEQ ID NO: 4011 - RNA, 22 nt, Artificial Sequence
  Synthetic
uggccagugucgucaugcccca

SEQ ID NO: 4012 - RNA, 22 nt, Artificial Sequence
  Synthetic
uggggcaugacgacacuggcca

SEQ ID NO: 4013 - RNA, 22 nt, Artificial Sequence
  Synthetic
uguccugcagguggggcaugac

SEQ ID NO: 4014 - RNA, 22 nt, Artificial Sequence
  Synthetic
ugucgucaugccccaccugcag

SEQ ID NO: 4015 - RNA, 20 nt, Artificial Sequence
  Synthetic
aaggaguggccaguguccuu

SEQ ID NO: 4016 - RNA, 20 nt, Artificial Sequence
  Synthetic
aggaguggccaguguccuua

SEQ ID NO: 4017 - RNA, 20 nt, Artificial Sequence
  Synthetic
agguggggcauaaggacacu

SEQ ID NO: 4018 - RNA, 20 nt, Artificial Sequence
  Synthetic
aguggccaguguccuuaugc

SEQ ID NO: 4019 - RNA, 20 nt, Artificial Sequence
  Synthetic
aguguccuuaugccccaccu

SEQ ID NO: 4020 - RNA, 20 nt, Artificial Sequence
  Synthetic
auaaggacacuggccacucc

SEQ ID NO: 4021 - RNA, 20 nt, Artificial Sequence
  Synthetic
caaggaguggccaguguccu

SEQ ID NO: 4022 - RNA, 20 nt, Artificial Sequence
  Synthetic
cagguggggcauaaggacac

SEQ ID NO: 4023 - RNA, 20 nt, Artificial Sequence
  Synthetic
caguguccuuaugccccacc

SEQ ID NO: 4024 - RNA, 20 nt, Artificial Sequence
  Synthetic
cauaaggacacuggccacuc

SEQ ID NO: 4025 - RNA, 20 nt, Artificial Sequence
  Synthetic
ccaguguccuuaugccccac

SEQ ID NO: 4026 - RNA, 20 nt, Artificial Sequence
  Synthetic
ccugcagguggggcauaagg

SEQ ID NO: 4027 - RNA, 20 nt, Artificial Sequence
  Synthetic
ccuuaugccccaccugcagg

SEQ ID NO: 4028 - RNA, 20 nt, Artificial Sequence
  Synthetic
cucuguccugcagguggggc

SEQ ID NO: 4029 - RNA, 20 nt, Artificial Sequence
  Synthetic
cugcagguggggcauaagga

SEQ ID NO: 4030 - RNA, 20 nt, Artificial Sequence
  Synthetic
cuuaugccccaccugcagga

SEQ ID NO: 4031 - RNA, 20 nt, Artificial Sequence
  Synthetic
gaguggccaguguccuuaug

SEQ ID NO: 4032 - RNA, 20 nt, Artificial Sequence
  Synthetic
gcaaggaguggccagugucc

SEQ ID NO: 4033 - RNA, 20 nt, Artificial Sequence
  Synthetic
gcagguggggcauaaggaca

SEQ ID NO: 4034 - RNA, 20 nt, Artificial Sequence
  Synthetic
gcauaaggacacuggccacu

SEQ ID NO: 4035 - RNA, 20 nt, Artificial Sequence
  Synthetic
gccaguguccuuaugcccca

SEQ ID NO: 4036 - RNA, 20 nt, Artificial Sequence
  Synthetic
ggaguggccaguguccuuau

SEQ ID NO: 4037 - RNA, 20 nt, Artificial Sequence
  Synthetic
ggcauaaggacacuggccac

SEQ ID NO: 4038 - RNA, 20 nt, Artificial Sequence
  Synthetic
ggccaguguccuuaugcccc

SEQ ID NO: 4039 - RNA, 20 nt, Artificial Sequence
  Synthetic
gggcauaaggacacuggcca

SEQ ID NO: 4040 - RNA, 20 nt, Artificial Sequence
  Synthetic
ggggcauaaggacacuggcc

SEQ ID NO: 4041 - RNA, 20 nt, Artificial Sequence
  Synthetic
gguggggcauaaggacacug

SEQ ID NO: 4042 - RNA, 20 nt, Artificial Sequence
  Synthetic
guccugcagguggggcauaa

SEQ ID NO: 4043 - RNA, 20 nt, Artificial Sequence
  Synthetic
guccuuaugccccaccugca

SEQ ID NO: 4044 - RNA, 20 nt, Artificial Sequence
  Synthetic
guggccaguguccuuaugcc

SEQ ID NO: 4045 - RNA, 20 nt, Artificial Sequence
  Synthetic
guggggcauaaggacacugg

SEQ ID NO: 4046 - RNA, 20 nt, Artificial Sequence
  Synthetic
guguccuuaugccccaccug

SEQ ID NO: 4047 - RNA, 20 nt, Artificial Sequence
  Synthetic
uaaggacacuggccacuccu

SEQ ID NO: 4048 - RNA, 20 nt, Artificial Sequence
  Synthetic
uccugcagguggggcauaag

SEQ ID NO: 4049 - RNA, 20 nt, Artificial Sequence
  Synthetic
uccuuaugccccaccugcag

SEQ ID NO: 4050 - RNA, 20 nt, Artificial Sequence
  Synthetic
ucucuguccugcaggugggg

SEQ ID NO: 4051 - RNA, 20 nt, Artificial Sequence
  Synthetic
ugcagguggggcauaaggac

SEQ ID NO: 4052 - RNA, 20 nt, Artificial Sequence
  Synthetic
uggccaguguccuuaugccc

SEQ ID NO: 4053 - RNA, 20 nt, Artificial Sequence
  Synthetic
uggggcauaaggacacuggc

SEQ ID NO: 4054 - RNA, 20 nt, Artificial Sequence
  Synthetic
uguccugcagguggggcaua

SEQ ID NO: 4055 - RNA, 20 nt, Artificial Sequence
  Synthetic
uguccuuaugccccaccugc

SEQ ID NO: 4056 - RNA, 20 nt, Artificial Sequence
  Synthetic
uuaugccccaccugcaggac

SEQ ID NO: 4057 - RNA, 21 nt, Artificial Sequence
  Synthetic
aaggaguggccaguguccuua

SEQ ID NO: 4058 - RNA, 21 nt, Artificial Sequence
  Synthetic
aggaguggccaguguccuuau

SEQ ID NO: 4059 - RNA, 21 nt, Artificial Sequence
  Synthetic
agguggggcauaaggacacug

SEQ ID NO: 4060 - RNA, 21 nt, Artificial Sequence
  Synthetic
aguggccaguguccuuaugcc

SEQ ID NO: 4061 - RNA, 21 nt, Artificial Sequence
  Synthetic
aguguccuuaugccccaccug

SEQ ID NO: 4062 - RNA, 21 nt, Artificial Sequence
  Synthetic
auaaggacacuggccacuccu

SEQ ID NO: 4063 - RNA, 21 nt, Artificial Sequence
  Synthetic
caaggaguggccaguguccuu

SEQ ID NO: 4064 - RNA, 21 nt, Artificial Sequence
  Synthetic
cagguggggcauaaggacacu

SEQ ID NO: 4065 - RNA, 21 nt, Artificial Sequence
  Synthetic
caguguccuuaugccccaccu

SEQ ID NO: 4066 - RNA, 21 nt, Artificial Sequence
  Synthetic
cauaaggacacuggccacucc

SEQ ID NO: 4067 - RNA, 21 nt, Artificial Sequence
  Synthetic
ccaguguccuuaugccccacc

SEQ ID NO: 4068 - RNA, 21 nt, Artificial Sequence
  Synthetic
ccugcagguggggcauaagga

SEQ ID NO: 4069 - RNA, 21 nt, Artificial Sequence
  Synthetic
ccuuaugccccaccugcagga

SEQ ID NO: 4070 - RNA, 21 nt, Artificial Sequence
  Synthetic
cucucuguccugcaggugggg

SEQ ID NO: 4071 - RNA, 21 nt, Artificial Sequence
  Synthetic
cugcagguggggcauaaggac

SEQ ID NO: 4072 - RNA, 21 nt, Artificial Sequence
  Synthetic
cuguccugcagguggggcaua

SEQ ID NO: 4073 - RNA, 21 nt, Artificial Sequence
  Synthetic
cuuaugccccaccugcaggac

SEQ ID NO: 4074 - RNA, 21 nt, Artificial Sequence
  Synthetic
gaguggccaguguccuuaugc

SEQ ID NO: 4075 - RNA, 21 nt, Artificial Sequence
  Synthetic
gcaaggaguggccaguguccu

SEQ ID NO: 4076 - RNA, 21 nt, Artificial Sequence
  Synthetic
gcagguggggcauaaggacac

SEQ ID NO: 4077 - RNA, 21 nt, Artificial Sequence
  Synthetic
gcauaaggacacuggccacuc

SEQ ID NO: 4078 - RNA, 21 nt, Artificial Sequence
  Synthetic
gccaguguccuuaugccccac

SEQ ID NO: 4079 - RNA, 21 nt, Artificial Sequence
  Synthetic
ggaguggccaguguccuuaug

SEQ ID NO: 4080 - RNA, 21 nt, Artificial Sequence
  Synthetic
ggcauaaggacacuggccacu

SEQ ID NO: 4081 - RNA, 21 nt, Artificial Sequence
  Synthetic
ggccaguguccuuaugcccca

SEQ ID NO: 4082 - RNA, 21 nt, Artificial Sequence
  Synthetic
gggcauaaggacacuggccac

SEQ ID NO: 4083 - RNA, 21 nt, Artificial Sequence
  Synthetic
ggggcauaaggacacuggcca

SEQ ID NO: 4084 - RNA, 21 nt, Artificial Sequence
  Synthetic
gguggggcauaaggacacugg

SEQ ID NO: 4085 - RNA, 21 nt, Artificial Sequence
  Synthetic
guccugcagguggggcauaag

SEQ ID NO: 4086 - RNA, 21 nt, Artificial Sequence
  Synthetic
guccuuaugccccaccugcag

SEQ ID NO: 4087 - RNA, 21 nt, Artificial Sequence
  Synthetic
guggccaguguccuuaugccc

SEQ ID NO: 4088 - RNA, 21 nt, Artificial Sequence
  Synthetic
guggggcauaaggacacuggc

SEQ ID NO: 4089 - RNA, 21 nt, Artificial Sequence
  Synthetic
guguccuuaugccccaccugc

SEQ ID NO: 4090 - RNA, 21 nt, Artificial Sequence
  Synthetic
uaaggacacuggccacuccuu

SEQ ID NO: 4091 - RNA, 21 nt, Artificial Sequence
  Synthetic
uccugcagguggggcauaagg

SEQ ID NO: 4092 - RNA, 21 nt, Artificial Sequence
  Synthetic
uccuuaugccccaccugcagg

SEQ ID NO: 4093 - RNA, 21 nt, Artificial Sequence
  Synthetic
ucucuguccugcagguggggc

SEQ ID NO: 4094 - RNA, 21 nt, Artificial Sequence
  Synthetic
ugcaaggaguggccagugucc

SEQ ID NO: 4095 - RNA, 21 nt, Artificial Sequence
  Synthetic
ugcagguggggcauaaggaca

SEQ ID NO: 4096 - RNA, 21 nt, Artificial Sequence
  Synthetic
uggccaguguccuuaugcccc

SEQ ID NO: 4097 - RNA, 21 nt, Artificial Sequence
  Synthetic
uggggcauaaggacacuggcc

SEQ ID NO: 4098 - RNA, 21 nt, Artificial Sequence
  Synthetic
uguccugcagguggggcauaa

SEQ ID NO: 4099 - RNA, 21 nt, Artificial Sequence
  Synthetic
uguccuuaugccccaccugca

SEQ ID NO: 4100 - RNA, 21 nt, Artificial Sequence
  Synthetic
uuaugccccaccugcaggaca

SEQ ID NO: 4101 - RNA, 22 nt, Artificial Sequence
  Synthetic
aaggaguggccaguguccuuau

SEQ ID NO: 4102 - RNA, 22 nt, Artificial Sequence
  Synthetic
aggaguggccaguguccuuaug

SEQ ID NO: 4103 - RNA, 22 nt, Artificial Sequence
  Synthetic
agguggggcauaaggacacugg

SEQ ID NO: 4104 - RNA, 22 nt, Artificial Sequence
  Synthetic
aguggccaguguccuuaugccc

SEQ ID NO: 4105 - RNA, 22 nt, Artificial Sequence
  Synthetic
aguguccuuaugccccaccugc

SEQ ID NO: 4106 - RNA, 22 nt, Artificial Sequence
  Synthetic
auaaggacacuggccacuccuu

SEQ ID NO: 4107 - RNA, 22 nt, Artificial Sequence
  Synthetic
augcaaggaguggccagugucc

SEQ ID NO: 4108 - RNA, 22 nt, Artificial Sequence
  Synthetic
caaggaguggccaguguccuua

SEQ ID NO: 4109 - RNA, 22 nt, Artificial Sequence
  Synthetic
cagguggggcauaaggacacug

SEQ ID NO: 4110 - RNA, 22 nt, Artificial Sequence
  Synthetic
caguguccuuaugccccaccug

SEQ ID NO: 4111 - RNA, 22 nt, Artificial Sequence
  Synthetic
cauaaggacacuggccacuccu

SEQ ID NO: 4112 - RNA, 22 nt, Artificial Sequence
  Synthetic
ccaguguccuuaugccccaccu

SEQ ID NO: 4113 - RNA, 22 nt, Artificial Sequence
  Synthetic
ccucucuguccugcaggugggg

SEQ ID NO: 4114 - RNA, 22 nt, Artificial Sequence
  Synthetic
ccugcagguggggcauaaggac

SEQ ID NO: 4115 - RNA, 22 nt, Artificial Sequence
  Synthetic
ccuuaugccccaccugcaggac

SEQ ID NO: 4116 - RNA, 22 nt, Artificial Sequence
  Synthetic
cucucuguccugcagguggggc

SEQ ID NO: 4117 - RNA, 22 nt, Artificial Sequence
  Synthetic
cugcagguggggcauaaggaca

SEQ ID NO: 4118 - RNA, 22 nt, Artificial Sequence
  Synthetic
cuguccugcagguggggcauaa

SEQ ID NO: 4119 - RNA, 22 nt, Artificial Sequence
  Synthetic
cuuaugccccaccugcaggaca

SEQ ID NO: 4120 - RNA, 22 nt, Artificial Sequence
  Synthetic
gaguggccaguguccuuaugcc

SEQ ID NO: 4121 - RNA, 22 nt, Artificial Sequence
  Synthetic
gcaaggaguggccaguguccuu

SEQ ID NO: 4122 - RNA, 22 nt, Artificial Sequence
  Synthetic
gcagguggggcauaaggacacu

SEQ ID NO: 4123 - RNA, 22 nt, Artificial Sequence
  Synthetic
gcauaaggacacuggccacucc

SEQ ID NO: 4124 - RNA, 22 nt, Artificial Sequence
  Synthetic
gccaguguccuuaugccccacc

SEQ ID NO: 4125 - RNA, 22 nt, Artificial Sequence
  Synthetic
ggaguggccaguguccuuaugc

SEQ ID NO: 4126 - RNA, 22 nt, Artificial Sequence
  Synthetic
ggcauaaggacacuggccacuc

SEQ ID NO: 4127 - RNA, 22 nt, Artificial Sequence
  Synthetic
ggccaguguccuuaugccccac

SEQ ID NO: 4128 - RNA, 22 nt, Artificial Sequence
  Synthetic
gggcauaaggacacuggccacu

SEQ ID NO: 4129 - RNA, 22 nt, Artificial Sequence
  Synthetic
ggggcauaaggacacuggccac

SEQ ID NO: 4130 - RNA, 22 nt, Artificial Sequence
  Synthetic
gguggggcauaaggacacuggc

SEQ ID NO: 4131 - RNA, 22 nt, Artificial Sequence
  Synthetic
guccugcagguggggcauaagg

SEQ ID NO: 4132 - RNA, 22 nt, Artificial Sequence
  Synthetic
guccuuaugccccaccugcagg

SEQ ID NO: 4133 - RNA, 22 nt, Artificial Sequence
  Synthetic
guggccaguguccuuaugcccc

SEQ ID NO: 4134 - RNA, 22 nt, Artificial Sequence
  Synthetic
guggggcauaaggacacuggcc

SEQ ID NO: 4135 - RNA, 22 nt, Artificial Sequence
  Synthetic
guguccuuaugccccaccugca

SEQ ID NO: 4136 - RNA, 22 nt, Artificial Sequence
  Synthetic
uaaggacacuggccacuccuug

SEQ ID NO: 4137 - RNA, 22 nt, Artificial Sequence
  Synthetic
uccugcagguggggcauaagga

SEQ ID NO: 4138 - RNA, 22 nt, Artificial Sequence
  Synthetic
uccuuaugccccaccugcagga

SEQ ID NO: 4139 - RNA, 22 nt, Artificial Sequence
  Synthetic
ucuguccugcagguggggcaua

SEQ ID NO: 4140 - RNA, 22 nt, Artificial Sequence
  Synthetic
ugcaaggaguggccaguguccu

SEQ ID NO: 4141 - RNA, 22 nt, Artificial Sequence
  Synthetic
ugcagguggggcauaaggacac

SEQ ID NO: 4142 - RNA, 22 nt, Artificial Sequence
  Synthetic
uggccaguguccuuaugcccca

SEQ ID NO: 4143 - RNA, 22 nt, Artificial Sequence
  Synthetic
uggggcauaaggacacuggcca

SEQ ID NO: 4144 - RNA, 22 nt, Artificial Sequence
  Synthetic
uguccugcagguggggcauaag

SEQ ID NO: 4145 - RNA, 22 nt, Artificial Sequence
  Synthetic
uguccuuaugccccaccugcag

SEQ ID NO: 4146 - RNA, 22 nt, Artificial Sequence
  Synthetic
uuaugccccaccugcaggacag

SEQ ID NO: 4147 - RNA, 20 nt, Artificial Sequence
  Synthetic
aaguggggcaugaggacacu

SEQ ID NO: 4148 - RNA, 20 nt, Artificial Sequence
  Synthetic
acuugcaggacagagaggga

SEQ ID NO: 4149 - RNA, 20 nt, Artificial Sequence
  Synthetic
aguguccucaugccccacuu

SEQ ID NO: 4150 - RNA, 20 nt, Artificial Sequence
  Synthetic
augccccacuugcaggacag

SEQ ID NO: 4151 - RNA, 20 nt, Artificial Sequence
  Synthetic
caaguggggcaugaggacac

SEQ ID NO: 4152 - RNA, 20 nt, Artificial Sequence
  Synthetic
cacuugcaggacagagaggg

SEQ ID NO: 4153 - RNA, 20 nt, Artificial Sequence
  Synthetic
caguguccucaugccccacu

SEQ ID NO: 4154 - RNA, 20 nt, Artificial Sequence
  Synthetic
caugccccacuugcaggaca

SEQ ID NO: 4155 - RNA, 20 nt, Artificial Sequence
  Synthetic
ccacuugcaggacagagagg

SEQ ID NO: 4156 - RNA, 20 nt, Artificial Sequence
  Synthetic
ccaguguccucaugccccac

SEQ ID NO: 4157 - RNA, 20 nt, Artificial Sequence
  Synthetic
cccacuugcaggacagagag

SEQ ID NO: 4158 - RNA, 20 nt, Artificial Sequence
  Synthetic
ccccacuugcaggacagaga

SEQ ID NO: 4159 - RNA, 20 nt, Artificial Sequence
  Synthetic
cccucucuguccugcaagug

SEQ ID NO: 4160 - RNA, 20 nt, Artificial Sequence
  Synthetic
cccugucccucucuguccug

SEQ ID NO: 4161 - RNA, 20 nt, Artificial Sequence
  Synthetic
ccucaugccccacuugcagg

SEQ ID NO: 4162 - RNA, 20 nt, Artificial Sequence
  Synthetic
ccucucuguccugcaagugg

SEQ ID NO: 4163 - RNA, 20 nt, Artificial Sequence
  Synthetic
ccugcaaguggggcaugagg

SEQ ID NO: 4164 - RNA, 20 nt, Artificial Sequence
  Synthetic
ccugucccucucuguccugc

SEQ ID NO: 4165 - RNA, 20 nt, Artificial Sequence
  Synthetic
cucaugccccacuugcagga

SEQ ID NO: 4166 - RNA, 20 nt, Artificial Sequence
  Synthetic
cucucuguccugcaaguggg

SEQ ID NO: 4167 - RNA, 20 nt, Artificial Sequence
  Synthetic
cucuguccugcaaguggggc

SEQ ID NO: 4168 - RNA, 20 nt, Artificial Sequence
  Synthetic
cugcaaguggggcaugagga

SEQ ID NO: 4169 - RNA, 20 nt, Artificial Sequence
  Synthetic
cugucccucucuguccugca

SEQ ID NO: 4170 - RNA, 20 nt, Artificial Sequence
  Synthetic
cuguccugcaaguggggcau

SEQ ID NO: 4171 - RNA, 20 nt, Artificial Sequence
  Synthetic
cuugcaggacagagagggac

SEQ ID NO: 4172 - RNA, 20 nt, Artificial Sequence
  Synthetic
gcaaguggggcaugaggaca

SEQ ID NO: 4173 - RNA, 20 nt, Artificial Sequence
  Synthetic
gccaguguccucaugcccca

SEQ ID NO: 4174 - RNA, 20 nt, Artificial Sequence
  Synthetic
gccccacuugcaggacagag

SEQ ID NO: 4175 - RNA, 20 nt, Artificial Sequence
  Synthetic
ggccaguguccucaugcccc

SEQ ID NO: 4176 - RNA, 20 nt, Artificial Sequence
  Synthetic
gucccucucuguccugcaag

SEQ ID NO: 4177 - RNA, 20 nt, Artificial Sequence
  Synthetic
guccucaugccccacuugca

SEQ ID NO: 4178 - RNA, 20 nt, Artificial Sequence
  Synthetic
guccugcaaguggggcauga

SEQ ID NO: 4179 - RNA, 20 nt, Artificial Sequence
  Synthetic
guguccucaugccccacuug

SEQ ID NO: 4180 - RNA, 20 nt, Artificial Sequence
  Synthetic
ucaugccccacuugcaggac

SEQ ID NO: 4181 - RNA, 20 nt, Artificial Sequence
  Synthetic
ucccucucuguccugcaagu

SEQ ID NO: 4182 - RNA, 20 nt, Artificial Sequence
  Synthetic
ucccugucccucucuguccu

SEQ ID NO: 4183 - RNA, 20 nt, Artificial Sequence
  Synthetic
uccucaugccccacuugcag

SEQ ID NO: 4184 - RNA, 20 nt, Artificial Sequence
  Synthetic
uccugcaaguggggcaugag

SEQ ID NO: 4185 - RNA, 20 nt, Artificial Sequence
  Synthetic
ucucuguccugcaagugggg

SEQ ID NO: 4186 - RNA, 20 nt, Artificial Sequence
  Synthetic
ucuguccugcaaguggggca

SEQ ID NO: 4187 - RNA, 20 nt, Artificial Sequence
  Synthetic
ugcaaguggggcaugaggac

SEQ ID NO: 4188 - RNA, 20 nt, Artificial Sequence
  Synthetic
ugccccacuugcaggacaga

SEQ ID NO: 4189 - RNA, 20 nt, Artificial Sequence
  Synthetic
uggccaguguccucaugccc

SEQ ID NO: 4190 - RNA, 20 nt, Artificial Sequence
  Synthetic
ugucccucucuguccugcaa

SEQ ID NO: 4191 - RNA, 20 nt, Artificial Sequence
  Synthetic
uguccucaugccccacuugc

SEQ ID NO: 4192 - RNA, 20 nt, Artificial Sequence
  Synthetic
uguccugcaaguggggcaug

SEQ ID NO: 4193 - RNA, 21 nt, Artificial Sequence
  Synthetic
aaguggggcaugaggacacug

SEQ ID NO: 4194 - RNA, 21 nt, Artificial Sequence
  Synthetic
acuugcaggacagagagggac

SEQ ID NO: 4195 - RNA, 21 nt, Artificial Sequence
  Synthetic
aguguccucaugccccacuug

SEQ ID NO: 4196 - RNA, 21 nt, Artificial Sequence
  Synthetic
augccccacuugcaggacaga

SEQ ID NO: 4197 - RNA, 21 nt, Artificial Sequence
  Synthetic
caaguggggcaugaggacacu

SEQ ID NO: 4198 - RNA, 21 nt, Artificial Sequence
  Synthetic
cacuugcaggacagagaggga

SEQ ID NO: 4199 - RNA, 21 nt, Artificial Sequence
  Synthetic
caguguccucaugccccacuu

SEQ ID NO: 4200 - RNA, 21 nt, Artificial Sequence
  Synthetic
caugccccacuugcaggacag

SEQ ID NO: 4201 - RNA, 21 nt, Artificial Sequence
  Synthetic
ccacuugcaggacagagaggg

SEQ ID NO: 4202 - RNA, 21 nt, Artificial Sequence
  Synthetic
ccaguguccucaugccccacu

SEQ ID NO: 4203 - RNA, 21 nt, Artificial Sequence
  Synthetic
cccacuugcaggacagagagg

SEQ ID NO: 4204 - RNA, 21 nt, Artificial Sequence
  Synthetic
ccccacuugcaggacagagag

SEQ ID NO: 4205 - RNA, 21 nt, Artificial Sequence
  Synthetic
cccucucuguccugcaagugg

SEQ ID NO: 4206 - RNA, 21 nt, Artificial Sequence
  Synthetic
cccugucccucucuguccugc

SEQ ID NO: 4207 - RNA, 21 nt, Artificial Sequence
  Synthetic
ccucaugccccacuugcagga

SEQ ID NO: 4208 - RNA, 21 nt, Artificial Sequence
  Synthetic
ccucucuguccugcaaguggg

SEQ ID NO: 4209 - RNA, 21 nt, Artificial Sequence
  Synthetic
ccugcaaguggggcaugagga

SEQ ID NO: 4210 - RNA, 21 nt, Artificial Sequence
  Synthetic
ccugucccucucuguccugca

SEQ ID NO: 4211 - RNA, 21 nt, Artificial Sequence
  Synthetic
cucaugccccacuugcaggac

SEQ ID NO: 4212 - RNA, 21 nt, Artificial Sequence
  Synthetic
cucccugucccucucuguccu

SEQ ID NO: 4213 - RNA, 21 nt, Artificial Sequence
  Synthetic
cucucuguccugcaagugggg

SEQ ID NO: 4214 - RNA, 21 nt, Artificial Sequence
  Synthetic
cucuguccugcaaguggggca

SEQ ID NO: 4215 - RNA, 21 nt, Artificial Sequence
  Synthetic
cugcaaguggggcaugaggac

SEQ ID NO: 4216 - RNA, 21 nt, Artificial Sequence
  Synthetic
cugucccucucuguccugcaa

SEQ ID NO: 4217 - RNA, 21 nt, Artificial Sequence
  Synthetic
cuguccugcaaguggggcaug

SEQ ID NO: 4218 - RNA, 21 nt, Artificial Sequence
  Synthetic
cuugcaggacagagagggaca

SEQ ID NO: 4219 - RNA, 21 nt, Artificial Sequence
  Synthetic
gcaaguggggcaugaggacac

SEQ ID NO: 4220 - RNA, 21 nt, Artificial Sequence
  Synthetic
gccaguguccucaugccccac

SEQ ID NO: 4221 - RNA, 21 nt, Artificial Sequence
  Synthetic
gccccacuugcaggacagaga

SEQ ID NO: 4222 - RNA, 21 nt, Artificial Sequence
  Synthetic
ggccaguguccucaugcccca

SEQ ID NO: 4223 - RNA, 21 nt, Artificial Sequence
  Synthetic
gucccucucuguccugcaagu

SEQ ID NO: 4224 - RNA, 21 nt, Artificial Sequence
  Synthetic
guccucaugccccacuugcag

SEQ ID NO: 4225 - RNA, 21 nt, Artificial Sequence
  Synthetic
guccugcaaguggggcaugag

SEQ ID NO: 4226 - RNA, 21 nt, Artificial Sequence
  Synthetic
guggccaguguccucaugccc

SEQ ID NO: 4227 - RNA, 21 nt, Artificial Sequence
  Synthetic
guguccucaugccccacuugc

SEQ ID NO: 4228 - RNA, 21 nt, Artificial Sequence
  Synthetic
ucaugccccacuugcaggaca

SEQ ID NO: 4229 - RNA, 21 nt, Artificial Sequence
  Synthetic
ucccucucuguccugcaagug

SEQ ID NO: 4230 - RNA, 21 nt, Artificial Sequence
  Synthetic
ucccugucccucucuguccug

SEQ ID NO: 4231 - RNA, 21 nt, Artificial Sequence
  Synthetic
uccucaugccccacuugcagg

SEQ ID NO: 4232 - RNA, 21 nt, Artificial Sequence
  Synthetic
uccugcaaguggggcaugagg

SEQ ID NO: 4233 - RNA, 21 nt, Artificial Sequence
  Synthetic
ucucuguccugcaaguggggc

SEQ ID NO: 4234 - RNA, 21 nt, Artificial Sequence
  Synthetic
ucuguccugcaaguggggcau

SEQ ID NO: 4235 - RNA, 21 nt, Artificial Sequence
  Synthetic
ugcaaguggggcaugaggaca

SEQ ID NO: 4236 - RNA, 21 nt, Artificial Sequence
  Synthetic
ugccccacuugcaggacagag

SEQ ID NO: 4237 - RNA, 21 nt, Artificial Sequence
  Synthetic
uggccaguguccucaugcccc

SEQ ID NO: 4238 - RNA, 21 nt, Artificial Sequence
  Synthetic
ugucccucucuguccugcaag

SEQ ID NO: 4239 - RNA, 21 nt, Artificial Sequence
  Synthetic
uguccucaugccccacuugca

SEQ ID NO: 4240 - RNA, 21 nt, Artificial Sequence
  Synthetic
uguccugcaaguggggcauga

SEQ ID NO: 4241 - RNA, 22 nt, Artificial Sequence
  Synthetic
aaguggggcaugaggacacugg

SEQ ID NO: 4242 - RNA, 22 nt, Artificial Sequence
  Synthetic
acuugcaggacagagagggaca

SEQ ID NO: 4243 - RNA, 22 nt, Artificial Sequence
  Synthetic
aguggccaguguccucaugccc

SEQ ID NO: 4244 - RNA, 22 nt, Artificial Sequence
  Synthetic
aguguccucaugccccacuugc

SEQ ID NO: 4245 - RNA, 22 nt, Artificial Sequence
  Synthetic
augccccacuugcaggacagag

SEQ ID NO: 4246 - RNA, 22 nt, Artificial Sequence
  Synthetic
caaguggggcaugaggacacug

SEQ ID NO: 4247 - RNA, 22 nt, Artificial Sequence
  Synthetic
cacuugcaggacagagagggac

SEQ ID NO: 4248 - RNA, 22 nt, Artificial Sequence
  Synthetic
caguguccucaugccccacuug

SEQ ID NO: 4249 - RNA, 22 nt, Artificial Sequence
  Synthetic
caugccccacuugcaggacaga

SEQ ID NO: 4250 - RNA, 22 nt, Artificial Sequence
  Synthetic
ccacuugcaggacagagaggga

SEQ ID NO: 4251 - RNA, 22 nt, Artificial Sequence
  Synthetic
ccaguguccucaugccccacuu

SEQ ID NO: 4252 - RNA, 22 nt, Artificial Sequence
  Synthetic
cccacuugcaggacagagaggg

SEQ ID NO: 4253 - RNA, 22 nt, Artificial Sequence
  Synthetic
ccccacuugcaggacagagagg

SEQ ID NO: 4254 - RNA, 22 nt, Artificial Sequence
  Synthetic
cccucucuguccugcaaguggg

SEQ ID NO: 4255 - RNA, 22 nt, Artificial Sequence
  Synthetic
cccugucccucucuguccugca

SEQ ID NO: 4256 - RNA, 22 nt, Artificial Sequence
  Synthetic
ccucaugccccacuugcaggac

SEQ ID NO: 4257 - RNA, 22 nt, Artificial Sequence
  Synthetic
ccucccugucccucucuguccu

SEQ ID NO: 4258 - RNA, 22 nt, Artificial Sequence
  Synthetic
ccucucuguccugcaagugggg

SEQ ID NO: 4259 - RNA, 22 nt, Artificial Sequence
  Synthetic
ccugcaaguggggcaugaggac

SEQ ID NO: 4260 - RNA, 22 nt, Artificial Sequence
  Synthetic
ccugucccucucuguccugcaa

SEQ ID NO: 4261 - RNA, 22 nt, Artificial Sequence
  Synthetic
cucaugccccacuugcaggaca

SEQ ID NO: 4262 - RNA, 22 nt, Artificial Sequence
  Synthetic
cucccugucccucucuguccug

SEQ ID NO: 4263 - RNA, 22 nt, Artificial Sequence
  Synthetic
cucucuguccugcaaguggggc

SEQ ID NO: 4264 - RNA, 22 nt, Artificial Sequence
  Synthetic
cucuguccugcaaguggggcau

SEQ ID NO: 4265 - RNA, 22 nt, Artificial Sequence
  Synthetic
cugcaaguggggcaugaggaca

SEQ ID NO: 4266 - RNA, 22 nt, Artificial Sequence
  Synthetic
cugucccucucuguccugcaag

SEQ ID NO: 4267 - RNA, 22 nt, Artificial Sequence
  Synthetic
cuguccugcaaguggggcauga

SEQ ID NO: 4268 - RNA, 22 nt, Artificial Sequence
  Synthetic
cuugcaggacagagagggacag

SEQ ID NO: 4269 - RNA, 22 nt, Artificial Sequence
  Synthetic
gcaaguggggcaugaggacacu

SEQ ID NO: 4270 - RNA, 22 nt, Artificial Sequence
  Synthetic
gccaguguccucaugccccacu

SEQ ID NO: 4271 - RNA, 22 nt, Artificial Sequence
  Synthetic
gccccacuugcaggacagagag

SEQ ID NO: 4272 - RNA, 22 nt, Artificial Sequence
  Synthetic
ggccaguguccucaugccccac

SEQ ID NO: 4273 - RNA, 22 nt, Artificial Sequence
  Synthetic
gucccucucuguccugcaagug

SEQ ID NO: 4274 - RNA, 22 nt, Artificial Sequence
  Synthetic
guccucaugccccacuugcagg

SEQ ID NO: 4275 - RNA, 22 nt, Artificial Sequence
  Synthetic
guccugcaaguggggcaugagg

SEQ ID NO: 4276 - RNA, 22 nt, Artificial Sequence
  Synthetic
guggccaguguccucaugcccc

SEQ ID NO: 4277 - RNA, 22 nt, Artificial Sequence
  Synthetic
guguccucaugccccacuugca

SEQ ID NO: 4278 - RNA, 22 nt, Artificial Sequence
  Synthetic
ucaugccccacuugcaggacag

SEQ ID NO: 4279 - RNA, 22 nt, Artificial Sequence
  Synthetic
ucccucucuguccugcaagugg

SEQ ID NO: 4280 - RNA, 22 nt, Artificial Sequence
  Synthetic
ucccugucccucucuguccugc

SEQ ID NO: 4281 - RNA, 22 nt, Artificial Sequence
  Synthetic
uccucaugccccacuugcagga

SEQ ID NO: 4282 - RNA, 22 nt, Artificial Sequence
  Synthetic
uccugcaaguggggcaugagga

SEQ ID NO: 4283 - RNA, 22 nt, Artificial Sequence
  Synthetic
ucucuguccugcaaguggggca

SEQ ID NO: 4284 - RNA, 22 nt, Artificial Sequence
  Synthetic
ucuguccugcaaguggggcaug

SEQ ID NO: 4285 - RNA, 22 nt, Artificial Sequence
  Synthetic
ugcaaguggggcaugaggacac

SEQ ID NO: 4286 - RNA, 22 nt, Artificial Sequence
  Synthetic
ugccccacuugcaggacagaga

SEQ ID NO: 4287 - RNA, 22 nt, Artificial Sequence
  Synthetic
uggccaguguccucaugcccca

SEQ ID NO: 4288 - RNA, 22 nt, Artificial Sequence
  Synthetic
ugucccucucuguccugcaagu

SEQ ID NO: 4289 - RNA, 22 nt, Artificial Sequence
  Synthetic
uguccucaugccccacuugcag

SEQ ID NO: 4290 - RNA, 22 nt, Artificial Sequence
  Synthetic
uguccugcaaguggggcaugag

SEQ ID NO: 4291 - RNA, 20 nt, Artificial Sequence
  Synthetic
acccgcaggacagagaggga

SEQ ID NO: 4292 - RNA, 20 nt, Artificial Sequence
  Synthetic
aguguccucaugccccaccc

SEQ ID NO: 4293 - RNA, 20 nt, Artificial Sequence
  Synthetic
augccccacccgcaggacag

SEQ ID NO: 4294 - RNA, 20 nt, Artificial Sequence
  Synthetic
cacccgcaggacagagaggg

SEQ ID NO: 4295 - RNA, 20 nt, Artificial Sequence
  Synthetic
caguguccucaugccccacc

SEQ ID NO: 4296 - RNA, 20 nt, Artificial Sequence
  Synthetic
caugccccacccgcaggaca

SEQ ID NO: 4297 - RNA, 20 nt, Artificial Sequence
  Synthetic
ccacccgcaggacagagagg

SEQ ID NO: 4298 - RNA, 20 nt, Artificial Sequence
  Synthetic
cccacccgcaggacagagag

SEQ ID NO: 4299 - RNA, 20 nt, Artificial Sequence
  Synthetic
ccccacccgcaggacagaga

SEQ ID NO: 4300 - RNA, 20 nt, Artificial Sequence
  Synthetic
cccgcaggacagagagggac

SEQ ID NO: 4301 - RNA, 20 nt, Artificial Sequence
  Synthetic
cccucucuguccugcgggug

SEQ ID NO: 4302 - RNA, 20 nt, Artificial Sequence
  Synthetic
ccgcaggacagagagggaca

SEQ ID NO: 4303 - RNA, 20 nt, Artificial Sequence
  Synthetic
ccucaugccccacccgcagg

SEQ ID NO: 4304 - RNA, 20 nt, Artificial Sequence
  Synthetic
ccucucuguccugcgggugg

SEQ ID NO: 4305 - RNA, 20 nt, Artificial Sequence
  Synthetic
ccugcggguggggcaugagg

SEQ ID NO: 4306 - RNA, 20 nt, Artificial Sequence
  Synthetic
cggguggggcaugaggacac

SEQ ID NO: 4307 - RNA, 20 nt, Artificial Sequence
  Synthetic
cucaugccccacccgcagga

SEQ ID NO: 4308 - RNA, 20 nt, Artificial Sequence
  Synthetic
cucccugucccucucugucc

SEQ ID NO: 4309 - RNA, 20 nt, Artificial Sequence
  Synthetic
cucucuguccugcggguggg

SEQ ID NO: 4310 - RNA, 20 nt, Artificial Sequence
  Synthetic
cucuguccugcggguggggc

SEQ ID NO: 4311 - RNA, 20 nt, Artificial Sequence
  Synthetic
cugcggguggggcaugagga

SEQ ID NO: 4312 - RNA, 20 nt, Artificial Sequence
  Synthetic
cugucccucucuguccugcg

SEQ ID NO: 4313 - RNA, 20 nt, Artificial Sequence
  Synthetic
cuguccugcggguggggcau

SEQ ID NO: 4314 - RNA, 20 nt, Artificial Sequence
  Synthetic
gccccacccgcaggacagag

SEQ ID NO: 4315 - RNA, 20 nt, Artificial Sequence
  Synthetic
gcggguggggcaugaggaca

SEQ ID NO: 4316 - RNA, 20 nt, Artificial Sequence
  Synthetic
gucccucucuguccugcggg

SEQ ID NO: 4317 - RNA, 20 nt, Artificial Sequence
  Synthetic
guccucaugccccacccgca

SEQ ID NO: 4318 - RNA, 20 nt, Artificial Sequence
  Synthetic
guccugcggguggggcauga

SEQ ID NO: 4319 - RNA, 20 nt, Artificial Sequence
  Synthetic
guguccucaugccccacccg

SEQ ID NO: 4320 - RNA, 20 nt, Artificial Sequence
  Synthetic
ucaugccccacccgcaggac

SEQ ID NO: 4321 - RNA, 20 nt, Artificial Sequence
  Synthetic
ucccucucuguccugcgggu

SEQ ID NO: 4322 - RNA, 20 nt, Artificial Sequence
  Synthetic
uccucaugccccacccgcag

SEQ ID NO: 4323 - RNA, 20 nt, Artificial Sequence
  Synthetic
uccugcggguggggcaugag

SEQ ID NO: 4324 - RNA, 20 nt, Artificial Sequence
  Synthetic
ucucuguccugcgggugggg

SEQ ID NO: 4325 - RNA, 20 nt, Artificial Sequence
  Synthetic
ucuguccugcggguggggca

SEQ ID NO: 4326 - RNA, 20 nt, Artificial Sequence
  Synthetic
ugccccacccgcaggacaga

SEQ ID NO: 4327 - RNA, 20 nt, Artificial Sequence
  Synthetic
ugcggguggggcaugaggac

SEQ ID NO: 4328 - RNA, 20 nt, Artificial Sequence
  Synthetic
ugucccucucuguccugcgg

SEQ ID NO: 4329 - RNA, 20 nt, Artificial Sequence
  Synthetic
uguccucaugccccacccgc

SEQ ID NO: 4330 - RNA, 20 nt, Artificial Sequence
  Synthetic
uguccugcggguggggcaug

SEQ ID NO: 4331 - RNA, 21 nt, Artificial Sequence
  Synthetic
acccgcaggacagagagggac

SEQ ID NO: 4332 - RNA, 21 nt, Artificial Sequence
  Synthetic
aguguccucaugccccacccg

SEQ ID NO: 4333 - RNA, 21 nt, Artificial Sequence
  Synthetic
augccccacccgcaggacaga

SEQ ID NO: 4334 - RNA, 21 nt, Artificial Sequence
  Synthetic
cacccgcaggacagagaggga

SEQ ID NO: 4335 - RNA, 21 nt, Artificial Sequence
  Synthetic
caguguccucaugccccaccc

SEQ ID NO: 4336 - RNA, 21 nt, Artificial Sequence
  Synthetic
caugccccacccgcaggacag

SEQ ID NO: 4337 - RNA, 21 nt, Artificial Sequence
  Synthetic
ccacccgcaggacagagaggg

SEQ ID NO: 4338 - RNA, 21 nt, Artificial Sequence
  Synthetic
ccaguguccucaugccccacc

SEQ ID NO: 4339 - RNA, 21 nt, Artificial Sequence
  Synthetic
cccacccgcaggacagagagg

SEQ ID NO: 4340 - RNA, 21 nt, Artificial Sequence
  Synthetic
ccccacccgcaggacagagag

SEQ ID NO: 4341 - RNA, 21 nt, Artificial Sequence
  Synthetic
cccgcaggacagagagggaca

SEQ ID NO: 4342 - RNA, 21 nt, Artificial Sequence
  Synthetic
cccucucuguccugcgggugg

SEQ ID NO: 4343 - RNA, 21 nt, Artificial Sequence
  Synthetic
ccgcaggacagagagggacag

SEQ ID NO: 4344 - RNA, 21 nt, Artificial Sequence
  Synthetic
ccucaugccccacccgcagga

SEQ ID NO: 4345 - RNA, 21 nt, Artificial Sequence
  Synthetic
ccucccugucccucucugucc

SEQ ID NO: 4346 - RNA, 21 nt, Artificial Sequence
  Synthetic
ccucucuguccugcggguggg

SEQ ID NO: 4347 - RNA, 21 nt, Artificial Sequence
  Synthetic
ccugcggguggggcaugagga

SEQ ID NO: 4348 - RNA, 21 nt, Artificial Sequence
  Synthetic
ccugucccucucuguccugcg

SEQ ID NO: 4349 - RNA, 21 nt, Artificial Sequence
  Synthetic
cggguggggcaugaggacacu

SEQ ID NO: 4350 - RNA, 21 nt, Artificial Sequence
  Synthetic
cucaugccccacccgcaggac

SEQ ID NO: 4351 - RNA, 21 nt, Artificial Sequence
  Synthetic
cucucuguccugcgggugggg

SEQ ID NO: 4352 - RNA, 21 nt, Artificial Sequence
  Synthetic
cucuguccugcggguggggca

SEQ ID NO: 4353 - RNA, 21 nt, Artificial Sequence
  Synthetic
cugcggguggggcaugaggac

SEQ ID NO: 4354 - RNA, 21 nt, Artificial Sequence
  Synthetic
cugucccucucuguccugcgg

SEQ ID NO: 4355 - RNA, 21 nt, Artificial Sequence
  Synthetic
cuguccugcggguggggcaug

SEQ ID NO: 4356 - RNA, 21 nt, Artificial Sequence
  Synthetic
gccccacccgcaggacagaga

SEQ ID NO: 4357 - RNA, 21 nt, Artificial Sequence
  Synthetic
gcggguggggcaugaggacac

SEQ ID NO: 4358 - RNA, 21 nt, Artificial Sequence
  Synthetic
gucccucucuguccugcgggu

SEQ ID NO: 4359 - RNA, 21 nt, Artificial Sequence
  Synthetic
guccucaugccccacccgcag

SEQ ID NO: 4360 - RNA, 21 nt, Artificial Sequence
  Synthetic
guccugcggguggggcaugag

SEQ ID NO: 4361 - RNA, 21 nt, Artificial Sequence
  Synthetic
guguccucaugccccacccgc

SEQ ID NO: 4362 - RNA, 21 nt, Artificial Sequence
  Synthetic
ucaugccccacccgcaggaca

SEQ ID NO: 4363 - RNA, 21 nt, Artificial Sequence
  Synthetic
ucccucucuguccugcgggug

SEQ ID NO: 4364 - RNA, 21 nt, Artificial Sequence
  Synthetic
uccucaugccccacccgcagg

SEQ ID NO: 4365 - RNA, 21 nt, Artificial Sequence
  Synthetic
uccugcggguggggcaugagg

SEQ ID NO: 4366 - RNA, 21 nt, Artificial Sequence
  Synthetic
ucucuguccugcggguggggc

SEQ ID NO: 4367 - RNA, 21 nt, Artificial Sequence
  Synthetic
ucuguccugcggguggggcau

SEQ ID NO: 4368 - RNA, 21 nt, Artificial Sequence
  Synthetic
ugccccacccgcaggacagag

SEQ ID NO: 4369 - RNA, 21 nt, Artificial Sequence
  Synthetic
ugcggguggggcaugaggaca

SEQ ID NO: 4370 - RNA, 21 nt, Artificial Sequence
  Synthetic
ugucccucucuguccugcggg

SEQ ID NO: 4371 - RNA, 21 nt, Artificial Sequence
  Synthetic
uguccucaugccccacccgca

SEQ ID NO: 4372 - RNA, 21 nt, Artificial Sequence
  Synthetic
uguccugcggguggggcauga

SEQ ID NO: 4373 - RNA, 22 nt, Artificial Sequence
  Synthetic
acccgcaggacagagagggaca

SEQ ID NO: 4374 - RNA, 22 nt, Artificial Sequence
  Synthetic
accucccugucccucucugucc

SEQ ID NO: 4375 - RNA, 22 nt, Artificial Sequence
  Synthetic
aguguccucaugccccacccgc

SEQ ID NO: 4376 - RNA, 22 nt, Artificial Sequence
  Synthetic
augccccacccgcaggacagag

SEQ ID NO: 4377 - RNA, 22 nt, Artificial Sequence
  Synthetic
cacccgcaggacagagagggac

SEQ ID NO: 4378 - RNA, 22 nt, Artificial Sequence
  Synthetic
caguguccucaugccccacccg

SEQ ID NO: 4379 - RNA, 22 nt, Artificial Sequence
  Synthetic
caugccccacccgcaggacaga

SEQ ID NO: 4380 - RNA, 22 nt, Artificial Sequence
  Synthetic
ccacccgcaggacagagaggga

SEQ ID NO: 4381 - RNA, 22 nt, Artificial Sequence
  Synthetic
ccaguguccucaugccccaccc

SEQ ID NO: 4382 - RNA, 22 nt, Artificial Sequence
  Synthetic
cccacccgcaggacagagaggg

SEQ ID NO: 4383 - RNA, 22 nt, Artificial Sequence
  Synthetic
ccccacccgcaggacagagagg

SEQ ID NO: 4384 - RNA, 22 nt, Artificial Sequence
  Synthetic
cccgcaggacagagagggacag

SEQ ID NO: 4385 - RNA, 22 nt, Artificial Sequence
  Synthetic
cccucucuguccugcggguggg

SEQ ID NO: 4386 - RNA, 22 nt, Artificial Sequence
  Synthetic
cccugucccucucuguccugcg

SEQ ID NO: 4387 - RNA, 22 nt, Artificial Sequence
  Synthetic
ccgcaggacagagagggacagg

SEQ ID NO: 4388 - RNA, 22 nt, Artificial Sequence
  Synthetic
ccucaugccccacccgcaggac

SEQ ID NO: 4389 - RNA, 22 nt, Artificial Sequence
  Synthetic
ccucucuguccugcgggugggg

SEQ ID NO: 4390 - RNA, 22 nt, Artificial Sequence
  Synthetic
ccugcggguggggcaugaggac

SEQ ID NO: 4391 - RNA, 22 nt, Artificial Sequence
  Synthetic
ccugucccucucuguccugcgg

SEQ ID NO: 4392 - RNA, 22 nt, Artificial Sequence
  Synthetic
cggguggggcaugaggacacug

SEQ ID NO: 4393 - RNA, 22 nt, Artificial Sequence
  Synthetic
cucaugccccacccgcaggaca

SEQ ID NO: 4394 - RNA, 22 nt, Artificial Sequence
  Synthetic
cucucuguccugcggguggggc

SEQ ID NO: 4395 - RNA, 22 nt, Artificial Sequence
  Synthetic
cucuguccugcggguggggcau

SEQ ID NO: 4396 - RNA, 22 nt, Artificial Sequence
  Synthetic
cugcggguggggcaugaggaca

SEQ ID NO: 4397 - RNA, 22 nt, Artificial Sequence
  Synthetic
cugucccucucuguccugcggg

SEQ ID NO: 4398 - RNA, 22 nt, Artificial Sequence
  Synthetic
cuguccugcggguggggcauga

SEQ ID NO: 4399 - RNA, 22 nt, Artificial Sequence
  Synthetic
gccaguguccucaugccccacc

SEQ ID NO: 4400 - RNA, 22 nt, Artificial Sequence
  Synthetic
gccccacccgcaggacagagag

SEQ ID NO: 4401 - RNA, 22 nt, Artificial Sequence
  Synthetic
gcggguggggcaugaggacacu

SEQ ID NO: 4402 - RNA, 22 nt, Artificial Sequence
  Synthetic
gucccucucuguccugcgggug

SEQ ID NO: 4403 - RNA, 22 nt, Artificial Sequence
  Synthetic
guccucaugccccacccgcagg

SEQ ID NO: 4404 - RNA, 22 nt, Artificial Sequence
  Synthetic
guccugcggguggggcaugagg

SEQ ID NO: 4405 - RNA, 22 nt, Artificial Sequence
  Synthetic
guguccucaugccccacccgca

SEQ ID NO: 4406 - RNA, 22 nt, Artificial Sequence
  Synthetic
ucaugccccacccgcaggacag

SEQ ID NO: 4407 - RNA, 22 nt, Artificial Sequence
  Synthetic
ucccucucuguccugcgggugg

SEQ ID NO: 4408 - RNA, 22 nt, Artificial Sequence
  Synthetic
uccucaugccccacccgcagga

SEQ ID NO: 4409 - RNA, 22 nt, Artificial Sequence
  Synthetic
uccugcggguggggcaugagga

SEQ ID NO: 4410 - RNA, 22 nt, Artificial Sequence
  Synthetic
ucucuguccugcggguggggca

SEQ ID NO: 4411 - RNA, 22 nt, Artificial Sequence
  Synthetic
ucuguccugcggguggggcaug

SEQ ID NO: 4412 - RNA, 22 nt, Artificial Sequence
  Synthetic
ugccccacccgcaggacagaga

SEQ ID NO: 4413 - RNA, 22 nt, Artificial Sequence
  Synthetic
ugcggguggggcaugaggacac

SEQ ID NO: 4414 - RNA, 22 nt, Artificial Sequence
  Synthetic
ugucccucucuguccugcgggu

SEQ ID NO: 4415 - RNA, 22 nt, Artificial Sequence
  Synthetic
uguccucaugccccacccgcag

SEQ ID NO: 4416 - RNA, 22 nt, Artificial Sequence
  Synthetic
uguccugcggguggggcaugag

SEQ ID NO: 4417 - RNA, 20 nt, Artificial Sequence
  Synthetic
acagcaugggucaccagguc

SEQ ID NO: 4418 - RNA, 20 nt, Artificial Sequence
  Synthetic
accuggugacccaugcugug

SEQ ID NO: 4419 - RNA, 20 nt, Artificial Sequence
  Synthetic
agcaugggucaccaggucaa

SEQ ID NO: 4420 - RNA, 20 nt, Artificial Sequence
  Synthetic
aggguuugaccuggugaccc

SEQ ID NO: 4421 - RNA, 20 nt, Artificial Sequence
  Synthetic
augggucaccaggucaaacc

SEQ ID NO: 4422 - RNA, 20 nt, Artificial Sequence
  Synthetic
cacagcaugggucaccaggu

SEQ ID NO: 4423 - RNA, 20 nt, Artificial Sequence
  Synthetic
cagcaugggucaccagguca

SEQ ID NO: 4424 - RNA, 20 nt, Artificial Sequence
  Synthetic
caggguuugaccuggugacc

SEQ ID NO: 4425 - RNA, 20 nt, Artificial Sequence
  Synthetic
caugggucaccaggucaaac

SEQ ID NO: 4426 - RNA, 20 nt, Artificial Sequence
  Synthetic
cccuucuguucacagcaugg

SEQ ID NO: 4427 - RNA, 20 nt, Artificial Sequence
  Synthetic
ccuggugacccaugcuguga

SEQ ID NO: 4428 - RNA, 20 nt, Artificial Sequence
  Synthetic
ccuucuguucacagcauggg

SEQ ID NO: 4429 - RNA, 20 nt, Artificial Sequence
  Synthetic
cuggugacccaugcugugaa

SEQ ID NO: 4430 - RNA, 20 nt, Artificial Sequence
  Synthetic
cuguucacagcaugggucac

SEQ ID NO: 4431 - RNA, 20 nt, Artificial Sequence
  Synthetic
cuucuguucacagcaugggu

SEQ ID NO: 4432 - RNA, 20 nt, Artificial Sequence
  Synthetic
gaccuggugacccaugcugu

SEQ ID NO: 4433 - RNA, 20 nt, Artificial Sequence
  Synthetic
gcaggguuugaccuggugac

SEQ ID NO: 4434 - RNA, 20 nt, Artificial Sequence
  Synthetic
gcaugggucaccaggucaaa

SEQ ID NO: 4435 - RNA, 20 nt, Artificial Sequence
  Synthetic
gcccuucuguucacagcaug

SEQ ID NO: 4436 - RNA, 20 nt, Artificial Sequence
  Synthetic
ggcaggguuugaccugguga

SEQ ID NO: 4437 - RNA, 20 nt, Artificial Sequence
  Synthetic
gggucaccaggucaaacccu

SEQ ID NO: 4438 - RNA, 20 nt, Artificial Sequence
  Synthetic
ggguuugaccuggugaccca

SEQ ID NO: 4439 - RNA, 20 nt, Artificial Sequence
  Synthetic
ggucaccaggucaaacccug

SEQ ID NO: 4440 - RNA, 20 nt, Artificial Sequence
  Synthetic
ggugacccaugcugugaaca

SEQ ID NO: 4441 - RNA, 20 nt, Artificial Sequence
  Synthetic
gguggcaggguuugaccugg

SEQ ID NO: 4442 - RNA, 20 nt, Artificial Sequence
  Synthetic
gguuugaccuggugacccau

SEQ ID NO: 4443 - RNA, 20 nt, Artificial Sequence
  Synthetic
gucaccaggucaaacccugc

SEQ ID NO: 4444 - RNA, 20 nt, Artificial Sequence
  Synthetic
gugacccaugcugugaacag

SEQ ID NO: 4445 - RNA, 20 nt, Artificial Sequence
  Synthetic
guggcaggguuugaccuggu

SEQ ID NO: 4446 - RNA, 20 nt, Artificial Sequence
  Synthetic
gugguggcaggguuugaccu

SEQ ID NO: 4447 - RNA, 20 nt, Artificial Sequence
  Synthetic
guucacagcaugggucacca

SEQ ID NO: 4448 - RNA, 20 nt, Artificial Sequence
  Synthetic
guuugaccuggugacccaug

SEQ ID NO: 4449 - RNA, 20 nt, Artificial Sequence
  Synthetic
ucacagcaugggucaccagg

SEQ ID NO: 4450 - RNA, 20 nt, Artificial Sequence
  Synthetic
ucaccaggucaaacccugcc

SEQ ID NO: 4451 - RNA, 20 nt, Artificial Sequence
  Synthetic
ucuguucacagcauggguca

SEQ ID NO: 4452 - RNA, 20 nt, Artificial Sequence
  Synthetic
ugacccaugcugugaacaga

SEQ ID NO: 4453 - RNA, 20 nt, Artificial Sequence
  Synthetic
ugaccuggugacccaugcug

SEQ ID NO: 4454 - RNA, 20 nt, Artificial Sequence
  Synthetic
uggcaggguuugaccuggug

SEQ ID NO: 4455 - RNA, 20 nt, Artificial Sequence
  Synthetic
ugggucaccaggucaaaccc

SEQ ID NO: 4456 - RNA, 20 nt, Artificial Sequence
  Synthetic
uggugacccaugcugugaac

SEQ ID NO: 4457 - RNA, 20 nt, Artificial Sequence
  Synthetic
ugguggcaggguuugaccug

SEQ ID NO: 4458 - RNA, 20 nt, Artificial Sequence
  Synthetic
uguucacagcaugggucacc

SEQ ID NO: 4459 - RNA, 20 nt, Artificial Sequence
  Synthetic
uucacagcaugggucaccag

SEQ ID NO: 4460 - RNA, 20 nt, Artificial Sequence
  Synthetic
uucuguucacagcauggguc

SEQ ID NO: 4461 - RNA, 20 nt, Artificial Sequence
  Synthetic
uugaccuggugacccaugcu

SEQ ID NO: 4462 - RNA, 20 nt, Artificial Sequence
  Synthetic
uuugaccuggugacccaugc

SEQ ID NO: 4463 - RNA, 21 nt, Artificial Sequence
  Synthetic
acagcaugggucaccagguca

SEQ ID NO: 4464 - RNA, 21 nt, Artificial Sequence
  Synthetic
accuggugacccaugcuguga

SEQ ID NO: 4465 - RNA, 21 nt, Artificial Sequence
  Synthetic
agcaugggucaccaggucaaa

SEQ ID NO: 4466 - RNA, 21 nt, Artificial Sequence
  Synthetic
agcccuucuguucacagcaug

SEQ ID NO: 4467 - RNA, 21 nt, Artificial Sequence
  Synthetic
aggguuugaccuggugaccca

SEQ ID NO: 4468 - RNA, 21 nt, Artificial Sequence
  Synthetic
augggucaccaggucaaaccc

SEQ ID NO: 4469 - RNA, 21 nt, Artificial Sequence
  Synthetic
cacagcaugggucaccagguc

SEQ ID NO: 4470 - RNA, 21 nt, Artificial Sequence
  Synthetic
cagcaugggucaccaggucaa

SEQ ID NO: 4471 - RNA, 21 nt, Artificial Sequence
  Synthetic
caggguuugaccuggugaccc

SEQ ID NO: 4472 - RNA, 21 nt, Artificial Sequence
  Synthetic
caugggucaccaggucaaacc

SEQ ID NO: 4473 - RNA, 21 nt, Artificial Sequence
  Synthetic
cccuucuguucacagcauggg

SEQ ID NO: 4474 - RNA, 21 nt, Artificial Sequence
  Synthetic
ccuggugacccaugcugugaa

SEQ ID NO: 4475 - RNA, 21 nt, Artificial Sequence
  Synthetic
ccuucuguucacagcaugggu

SEQ ID NO: 4476 - RNA, 21 nt, Artificial Sequence
  Synthetic
cuggugacccaugcugugaac

SEQ ID NO: 4477 - RNA, 21 nt, Artificial Sequence
  Synthetic
cuguucacagcaugggucacc

SEQ ID NO: 4478 - RNA, 21 nt, Artificial Sequence
  Synthetic
cuucuguucacagcauggguc

SEQ ID NO: 4479 - RNA, 21 nt, Artificial Sequence
  Synthetic
gaccuggugacccaugcugug

SEQ ID NO: 4480 - RNA, 21 nt, Artificial Sequence
  Synthetic
gcaggguuugaccuggugacc

SEQ ID NO: 4481 - RNA, 21 nt, Artificial Sequence
  Synthetic
gcaugggucaccaggucaaac

SEQ ID NO: 4482 - RNA, 21 nt, Artificial Sequence
  Synthetic
gcccuucuguucacagcaugg

SEQ ID NO: 4483 - RNA, 21 nt, Artificial Sequence
  Synthetic
ggcaggguuugaccuggugac

SEQ ID NO: 4484 - RNA, 21 nt, Artificial Sequence
  Synthetic
gggucaccaggucaaacccug

SEQ ID NO: 4485 - RNA, 21 nt, Artificial Sequence
  Synthetic
ggguuugaccuggugacccau

SEQ ID NO: 4486 - RNA, 21 nt, Artificial Sequence
  Synthetic
ggucaccaggucaaacccugc

SEQ ID NO: 4487 - RNA, 21 nt, Artificial Sequence
  Synthetic
ggugacccaugcugugaacag

SEQ ID NO: 4488 - RNA, 21 nt, Artificial Sequence
  Synthetic
gguggcaggguuugaccuggu

SEQ ID NO: 4489 - RNA, 21 nt, Artificial Sequence
  Synthetic
ggugguggcaggguuugaccu

SEQ ID NO: 4490 - RNA, 21 nt, Artificial Sequence
  Synthetic
gguuugaccuggugacccaug

SEQ ID NO: 4491 - RNA, 21 nt, Artificial Sequence
  Synthetic
gucaccaggucaaacccugcc

SEQ ID NO: 4492 - RNA, 21 nt, Artificial Sequence
  Synthetic
gugacccaugcugugaacaga

SEQ ID NO: 4493 - RNA, 21 nt, Artificial Sequence
  Synthetic
guggcaggguuugaccuggug

SEQ ID NO: 4494 - RNA, 21 nt, Artificial Sequence
  Synthetic
gugguggcaggguuugaccug

SEQ ID NO: 4495 - RNA, 21 nt, Artificial Sequence
  Synthetic
guucacagcaugggucaccag

SEQ ID NO: 4496 - RNA, 21 nt, Artificial Sequence
  Synthetic
guuugaccuggugacccaugc

SEQ ID NO: 4497 - RNA, 21 nt, Artificial Sequence
  Synthetic
ucacagcaugggucaccaggu

SEQ ID NO: 4498 - RNA, 21 nt, Artificial Sequence
  Synthetic
ucaccaggucaaacccugcca

SEQ ID NO: 4499 - RNA, 21 nt, Artificial Sequence
  Synthetic
ucuguucacagcaugggucac

SEQ ID NO: 4500 - RNA, 21 nt, Artificial Sequence
  Synthetic
ugacccaugcugugaacagaa

SEQ ID NO: 4501 - RNA, 21 nt, Artificial Sequence
  Synthetic
ugaccuggugacccaugcugu

SEQ ID NO: 4502 - RNA, 21 nt, Artificial Sequence
  Synthetic
uggcaggguuugaccugguga

SEQ ID NO: 4503 - RNA, 21 nt, Artificial Sequence
  Synthetic
ugggucaccaggucaaacccu

SEQ ID NO: 4504 - RNA, 21 nt, Artificial Sequence
  Synthetic
uggugacccaugcugugaaca

SEQ ID NO: 4505 - RNA, 21 nt, Artificial Sequence
  Synthetic
ugguggcaggguuugaccugg

SEQ ID NO: 4506 - RNA, 21 nt, Artificial Sequence
  Synthetic
uguucacagcaugggucacca

SEQ ID NO: 4507 - RNA, 21 nt, Artificial Sequence
  Synthetic
uucacagcaugggucaccagg

SEQ ID NO: 4508 - RNA, 21 nt, Artificial Sequence
  Synthetic
uucuguucacagcauggguca

SEQ ID NO: 4509 - RNA, 21 nt, Artificial Sequence
  Synthetic
uugaccuggugacccaugcug

SEQ ID NO: 4510 - RNA, 21 nt, Artificial Sequence
  Synthetic
uuugaccuggugacccaugcu

SEQ ID NO: 4511 - RNA, 22 nt, Artificial Sequence
  Synthetic
acagcaugggucaccaggucaa

SEQ ID NO: 4512 - RNA, 22 nt, Artificial Sequence
  Synthetic
accuggugacccaugcugugaa

SEQ ID NO: 4513 - RNA, 22 nt, Artificial Sequence
  Synthetic
agcaugggucaccaggucaaac

SEQ ID NO: 4514 - RNA, 22 nt, Artificial Sequence
  Synthetic
agcccuucuguucacagcaugg

SEQ ID NO: 4515 - RNA, 22 nt, Artificial Sequence
  Synthetic
aggguuugaccuggugacccau

SEQ ID NO: 4516 - RNA, 22 nt, Artificial Sequence
  Synthetic
augggucaccaggucaaacccu

SEQ ID NO: 4517 - RNA, 22 nt, Artificial Sequence
  Synthetic
cacagcaugggucaccagguca

SEQ ID NO: 4518 - RNA, 22 nt, Artificial Sequence
  Synthetic
cagcaugggucaccaggucaaa

SEQ ID NO: 4519 - RNA, 22 nt, Artificial Sequence
  Synthetic
cagcccuucuguucacagcaug

SEQ ID NO: 4520 - RNA, 22 nt, Artificial Sequence
  Synthetic
caggguuugaccuggugaccca

SEQ ID NO: 4521 - RNA, 22 nt, Artificial Sequence
  Synthetic
caugggucaccaggucaaaccc

SEQ ID NO: 4522 - RNA, 22 nt, Artificial Sequence
  Synthetic
cccuucuguucacagcaugggu

SEQ ID NO: 4523 - RNA, 22 nt, Artificial Sequence
  Synthetic
ccuggugacccaugcugugaac

SEQ ID NO: 4524 - RNA, 22 nt, Artificial Sequence
  Synthetic
ccuucuguucacagcauggguc

SEQ ID NO: 4525 - RNA, 22 nt, Artificial Sequence
  Synthetic
cggugguggcaggguuugaccu

SEQ ID NO: 4526 - RNA, 22 nt, Artificial Sequence
  Synthetic
cuggugacccaugcugugaaca

SEQ ID NO: 4527 - RNA, 22 nt, Artificial Sequence
  Synthetic
cuguucacagcaugggucacca

SEQ ID NO: 4528 - RNA, 22 nt, Artificial Sequence
  Synthetic
cuucuguucacagcauggguca

SEQ ID NO: 4529 - RNA, 22 nt, Artificial Sequence
  Synthetic
gaccuggugacccaugcuguga

SEQ ID NO: 4530 - RNA, 22 nt, Artificial Sequence
  Synthetic
gcaggguuugaccuggugaccc

SEQ ID NO: 4531 - RNA, 22 nt, Artificial Sequence
  Synthetic
gcaugggucaccaggucaaacc

SEQ ID NO: 4532 - RNA, 22 nt, Artificial Sequence
  Synthetic
gcccuucuguucacagcauggg

SEQ ID NO: 4533 - RNA, 22 nt, Artificial Sequence
  Synthetic
ggcaggguuugaccuggugacc

SEQ ID NO: 4534 - RNA, 22 nt, Artificial Sequence
  Synthetic
gggucaccaggucaaacccugc

SEQ ID NO: 4535 - RNA, 22 nt, Artificial Sequence
  Synthetic
ggguuugaccuggugacccaug

SEQ ID NO: 4536 - RNA, 22 nt, Artificial Sequence
  Synthetic
ggucaccaggucaaacccugcc

SEQ ID NO: 4537 - RNA, 22 nt, Artificial Sequence
  Synthetic
ggugacccaugcugugaacaga

SEQ ID NO: 4538 - RNA, 22 nt, Artificial Sequence
  Synthetic
gguggcaggguuugaccuggug

SEQ ID NO: 4539 - RNA, 22 nt, Artificial Sequence
  Synthetic
ggugguggcaggguuugaccug

SEQ ID NO: 4540 - RNA, 22 nt, Artificial Sequence
  Synthetic
gguuugaccuggugacccaugc

SEQ ID NO: 4541 - RNA, 22 nt, Artificial Sequence
  Synthetic
gucaccaggucaaacccugcca

SEQ ID NO: 4542 - RNA, 22 nt, Artificial Sequence
  Synthetic
gugacccaugcugugaacagaa

SEQ ID NO: 4543 - RNA, 22 nt, Artificial Sequence
  Synthetic
guggcaggguuugaccugguga

SEQ ID NO: 4544 - RNA, 22 nt, Artificial Sequence
  Synthetic
gugguggcaggguuugaccugg

SEQ ID NO: 4545 - RNA, 22 nt, Artificial Sequence
  Synthetic
guucacagcaugggucaccagg

SEQ ID NO: 4546 - RNA, 22 nt, Artificial Sequence
  Synthetic
guuugaccuggugacccaugcu

SEQ ID NO: 4547 - RNA, 22 nt, Artificial Sequence
  Synthetic
ucacagcaugggucaccagguc

SEQ ID NO: 4548 - RNA, 22 nt, Artificial Sequence
  Synthetic
ucaccaggucaaacccugccac

SEQ ID NO: 4549 - RNA, 22 nt, Artificial Sequence
  Synthetic
ucuguucacagcaugggucacc

SEQ ID NO: 4550 - RNA, 22 nt, Artificial Sequence
  Synthetic
ugacccaugcugugaacagaag

SEQ ID NO: 4551 - RNA, 22 nt, Artificial Sequence
  Synthetic
ugaccuggugacccaugcugug

SEQ ID NO: 4552 - RNA, 22 nt, Artificial Sequence
  Synthetic
uggcaggguuugaccuggugac

SEQ ID NO: 4553 - RNA, 22 nt, Artificial Sequence
  Synthetic
ugggucaccaggucaaacccug

SEQ ID NO: 4554 - RNA, 22 nt, Artificial Sequence
  Synthetic
uggugacccaugcugugaacag

SEQ ID NO: 4555 - RNA, 22 nt, Artificial Sequence
  Synthetic
ugguggcaggguuugaccuggu

SEQ ID NO: 4556 - RNA, 22 nt, Artificial Sequence
  Synthetic
uguucacagcaugggucaccag

SEQ ID NO: 4557 - RNA, 22 nt, Artificial Sequence
  Synthetic
uucacagcaugggucaccaggu

SEQ ID NO: 4558 - RNA, 22 nt, Artificial Sequence
  Synthetic
uucuguucacagcaugggucac

SEQ ID NO: 4559 - RNA, 22 nt, Artificial Sequence
  Synthetic
uugaccuggugacccaugcugu

SEQ ID NO: 4560 - RNA, 22 nt, Artificial Sequence
  Synthetic
uuugaccuggugacccaugcug

SEQ ID NO: 4561 - RNA, 20 nt, Artificial Sequence
  Synthetic
aaacucugccaccaccgugg

SEQ ID NO: 4562 - RNA, 20 nt, Artificial Sequence
  Synthetic
aacucugccaccaccguggg

SEQ ID NO: 4563 - RNA, 20 nt, Artificial Sequence
  Synthetic
aaguuccccacggugguggc

SEQ ID NO: 4564 - RNA, 20 nt, Artificial Sequence
  Synthetic
accaggucaaacucugccac

SEQ ID NO: 4565 - RNA, 20 nt, Artificial Sequence
  Synthetic
acggugguggcagaguuuga

SEQ ID NO: 4566 - RNA, 20 nt, Artificial Sequence
  Synthetic
acucugccaccaccgugggg

SEQ ID NO: 4567 - RNA, 20 nt, Artificial Sequence
  Synthetic
agaguuugaccugguaaccc

SEQ ID NO: 4568 - RNA, 20 nt, Artificial Sequence
  Synthetic
agcauggguuaccaggucaa

SEQ ID NO: 4569 - RNA, 20 nt, Artificial Sequence
  Synthetic
aggucaaacucugccaccac

SEQ ID NO: 4570 - RNA, 20 nt, Artificial Sequence
  Synthetic
aguuccccacggugguggca

SEQ ID NO: 4571 - RNA, 20 nt, Artificial Sequence
  Synthetic
auggguuaccaggucaaacu

SEQ ID NO: 4572 - RNA, 20 nt, Artificial Sequence
  Synthetic
caaacucugccaccaccgug

SEQ ID NO: 4573 - RNA, 20 nt, Artificial Sequence
  Synthetic
caaguuccccacgguggugg

SEQ ID NO: 4574 - RNA, 20 nt, Artificial Sequence
  Synthetic
cacggugguggcagaguuug

SEQ ID NO: 4575 - RNA, 20 nt, Artificial Sequence
  Synthetic
cagaguuugaccugguaacc

SEQ ID NO: 4576 - RNA, 20 nt, Artificial Sequence
  Synthetic
cagcauggguuaccagguca

SEQ ID NO: 4577 - RNA, 20 nt, Artificial Sequence
  Synthetic
caggucaaacucugccacca

SEQ ID NO: 4578 - RNA, 20 nt, Artificial Sequence
  Synthetic
cauggguuaccaggucaaac

SEQ ID NO: 4579 - RNA, 20 nt, Artificial Sequence
  Synthetic
ccacggugguggcagaguuu

SEQ ID NO: 4580 - RNA, 20 nt, Artificial Sequence
  Synthetic
ccaggucaaacucugccacc

SEQ ID NO: 4581 - RNA, 20 nt, Artificial Sequence
  Synthetic
cccacggugguggcagaguu

SEQ ID NO: 4582 - RNA, 20 nt, Artificial Sequence
  Synthetic
ccccacggugguggcagagu

SEQ ID NO: 4583 - RNA, 20 nt, Artificial Sequence
  Synthetic
cggugguggcagaguuugac

SEQ ID NO: 4584 - RNA, 20 nt, Artificial Sequence
  Synthetic
cucugccaccaccgugggga

SEQ ID NO: 4585 - RNA, 20 nt, Artificial Sequence
  Synthetic
gaguuugaccugguaaccca

SEQ ID NO: 4586 - RNA, 20 nt, Artificial Sequence
  Synthetic
gcagaguuugaccugguaac

SEQ ID NO: 4587 - RNA, 20 nt, Artificial Sequence
  Synthetic
gcauggguuaccaggucaaa

SEQ ID NO: 4588 - RNA, 20 nt, Artificial Sequence
  Synthetic
ggcagaguuugaccugguaa

SEQ ID NO: 4589 - RNA, 20 nt, Artificial Sequence
  Synthetic
ggguuaccaggucaaacucu

SEQ ID NO: 4590 - RNA, 20 nt, Artificial Sequence
  Synthetic
ggucaaacucugccaccacc

SEQ ID NO: 4591 - RNA, 20 nt, Artificial Sequence
  Synthetic
gguggcagaguuugaccugg

SEQ ID NO: 4592 - RNA, 20 nt, Artificial Sequence
  Synthetic
ggugguggcagaguuugacc

SEQ ID NO: 4593 - RNA, 20 nt, Artificial Sequence
  Synthetic
gguuaccaggucaaacucug

SEQ ID NO: 4594 - RNA, 20 nt, Artificial Sequence
  Synthetic
gucaaacucugccaccaccg

SEQ ID NO: 4595 - RNA, 20 nt, Artificial Sequence
  Synthetic
guggcagaguuugaccuggu

SEQ ID NO: 4596 - RNA, 20 nt, Artificial Sequence
  Synthetic
gugguggcagaguuugaccu

SEQ ID NO: 4597 - RNA, 20 nt, Artificial Sequence
  Synthetic
guuaccaggucaaacucugc

SEQ ID NO: 4598 - RNA, 20 nt, Artificial Sequence
  Synthetic
guuccccacggugguggcag

SEQ ID NO: 4599 - RNA, 20 nt, Artificial Sequence
  Synthetic
uaccaggucaaacucugcca

SEQ ID NO: 4600 - RNA, 20 nt, Artificial Sequence
  Synthetic
ucaaacucugccaccaccgu

SEQ ID NO: 4601 - RNA, 20 nt, Artificial Sequence
  Synthetic
uccccacggugguggcagag

SEQ ID NO: 4602 - RNA, 20 nt, Artificial Sequence
  Synthetic
uggcagaguuugaccuggua

SEQ ID NO: 4603 - RNA, 20 nt, Artificial Sequence
  Synthetic
uggguuaccaggucaaacuc

SEQ ID NO: 4604 - RNA, 20 nt, Artificial Sequence
  Synthetic
ugguggcagaguuugaccug

SEQ ID NO: 4605 - RNA, 20 nt, Artificial Sequence
  Synthetic
uuaccaggucaaacucugcc

SEQ ID NO: 4606 - RNA, 20 nt, Artificial Sequence
  Synthetic
uuccccacggugguggcaga

SEQ ID NO: 4607 - RNA, 21 nt, Artificial Sequence
  Synthetic
aaacucugccaccaccguggg

SEQ ID NO: 4608 - RNA, 21 nt, Artificial Sequence
  Synthetic
aacucugccaccaccgugggg

SEQ ID NO: 4609 - RNA, 21 nt, Artificial Sequence
  Synthetic
aaguuccccacggugguggca

SEQ ID NO: 4610 - RNA, 21 nt, Artificial Sequence
  Synthetic
acagcauggguuaccagguca

SEQ ID NO: 4611 - RNA, 21 nt, Artificial Sequence
  Synthetic
accaggucaaacucugccacc

SEQ ID NO: 4612 - RNA, 21 nt, Artificial Sequence
  Synthetic
acggugguggcagaguuugac

SEQ ID NO: 4613 - RNA, 21 nt, Artificial Sequence
  Synthetic
acucugccaccaccgugggga

SEQ ID NO: 4614 - RNA, 21 nt, Artificial Sequence
  Synthetic
agaguuugaccugguaaccca

SEQ ID NO: 4615 - RNA, 21 nt, Artificial Sequence
  Synthetic
agcauggguuaccaggucaaa

SEQ ID NO: 4616 - RNA, 21 nt, Artificial Sequence
  Synthetic
aggucaaacucugccaccacc

SEQ ID NO: 4617 - RNA, 21 nt, Artificial Sequence
  Synthetic
aguuccccacggugguggcag

SEQ ID NO: 4618 - RNA, 21 nt, Artificial Sequence
  Synthetic
auggguuaccaggucaaacuc

SEQ ID NO: 4619 - RNA, 21 nt, Artificial Sequence
  Synthetic
caaacucugccaccaccgugg

SEQ ID NO: 4620 - RNA, 21 nt, Artificial Sequence
  Synthetic
caaguuccccacggugguggc

SEQ ID NO: 4621 - RNA, 21 nt, Artificial Sequence
  Synthetic
cacggugguggcagaguuuga

SEQ ID NO: 4622 - RNA, 21 nt, Artificial Sequence
  Synthetic
cagaguuugaccugguaaccc

SEQ ID NO: 4623 - RNA, 21 nt, Artificial Sequence
  Synthetic
cagcauggguuaccaggucaa

SEQ ID NO: 4624 - RNA, 21 nt, Artificial Sequence
  Synthetic
caggucaaacucugccaccac

SEQ ID NO: 4625 - RNA, 21 nt, Artificial Sequence
  Synthetic
cauggguuaccaggucaaacu

SEQ ID NO: 4626 - RNA, 21 nt, Artificial Sequence
  Synthetic
ccacggugguggcagaguuug

SEQ ID NO: 4627 - RNA, 21 nt, Artificial Sequence
  Synthetic
ccaggucaaacucugccacca

SEQ ID NO: 4628 - RNA, 21 nt, Artificial Sequence
  Synthetic
cccacggugguggcagaguuu

SEQ ID NO: 4629 - RNA, 21 nt, Artificial Sequence
  Synthetic
ccccacggugguggcagaguu

SEQ ID NO: 4630 - RNA, 21 nt, Artificial Sequence
  Synthetic
cggugguggcagaguuugacc

SEQ ID NO: 4631 - RNA, 21 nt, Artificial Sequence
  Synthetic
cucugccaccaccguggggaa

SEQ ID NO: 4632 - RNA, 21 nt, Artificial Sequence
  Synthetic
gaguuugaccugguaacccau

SEQ ID NO: 4633 - RNA, 21 nt, Artificial Sequence
  Synthetic
gcagaguuugaccugguaacc

SEQ ID NO: 4634 - RNA, 21 nt, Artificial Sequence
  Synthetic
gcauggguuaccaggucaaac

SEQ ID NO: 4635 - RNA, 21 nt, Artificial Sequence
  Synthetic
ggcagaguuugaccugguaac

SEQ ID NO: 4636 - RNA, 21 nt, Artificial Sequence
  Synthetic
ggguuaccaggucaaacucug

SEQ ID NO: 4637 - RNA, 21 nt, Artificial Sequence
  Synthetic
ggucaaacucugccaccaccg

SEQ ID NO: 4638 - RNA, 21 nt, Artificial Sequence
  Synthetic
gguggcagaguuugaccuggu

SEQ ID NO: 4639 - RNA, 21 nt, Artificial Sequence
  Synthetic
ggugguggcagaguuugaccu

SEQ ID NO: 4640 - RNA, 21 nt, Artificial Sequence
  Synthetic
gguuaccaggucaaacucugc

SEQ ID NO: 4641 - RNA, 21 nt, Artificial Sequence
  Synthetic
gucaaacucugccaccaccgu

SEQ ID NO: 4642 - RNA, 21 nt, Artificial Sequence
  Synthetic
guggcagaguuugaccuggua

SEQ ID NO: 4643 - RNA, 21 nt, Artificial Sequence
  Synthetic
gugguggcagaguuugaccug

SEQ ID NO: 4644 - RNA, 21 nt, Artificial Sequence
  Synthetic
guuaccaggucaaacucugcc

SEQ ID NO: 4645 - RNA, 21 nt, Artificial Sequence
  Synthetic
guuccccacggugguggcaga

SEQ ID NO: 4646 - RNA, 21 nt, Artificial Sequence
  Synthetic
uaccaggucaaacucugccac

SEQ ID NO: 4647 - RNA, 21 nt, Artificial Sequence
  Synthetic
ucaaacucugccaccaccgug

SEQ ID NO: 4648 - RNA, 21 nt, Artificial Sequence
  Synthetic
ucaaguuccccacgguggugg

SEQ ID NO: 4649 - RNA, 21 nt, Artificial Sequence
  Synthetic
uccccacggugguggcagagu

SEQ ID NO: 4650 - RNA, 21 nt, Artificial Sequence
  Synthetic
uggcagaguuugaccugguaa

SEQ ID NO: 4651 - RNA, 21 nt, Artificial Sequence
  Synthetic
uggguuaccaggucaaacucu

SEQ ID NO: 4652 - RNA, 21 nt, Artificial Sequence
  Synthetic
ugguggcagaguuugaccugg

SEQ ID NO: 4653 - RNA, 21 nt, Artificial Sequence
  Synthetic
uuaccaggucaaacucugcca

SEQ ID NO: 4654 - RNA, 21 nt, Artificial Sequence
  Synthetic
uuccccacggugguggcagag

SEQ ID NO: 4655 - RNA, 22 nt, Artificial Sequence
  Synthetic
aaacucugccaccaccgugggg

SEQ ID NO: 4656 - RNA, 22 nt, Artificial Sequence
  Synthetic
aacucugccaccaccgugggga

SEQ ID NO: 4657 - RNA, 22 nt, Artificial Sequence
  Synthetic
aaguuccccacggugguggcag

SEQ ID NO: 4658 - RNA, 22 nt, Artificial Sequence
  Synthetic
acagcauggguuaccaggucaa

SEQ ID NO: 4659 - RNA, 22 nt, Artificial Sequence
  Synthetic
accaggucaaacucugccacca

SEQ ID NO: 4660 - RNA, 22 nt, Artificial Sequence
  Synthetic
acggugguggcagaguuugacc

SEQ ID NO: 4661 - RNA, 22 nt, Artificial Sequence
  Synthetic
acucugccaccaccguggggaa

SEQ ID NO: 4662 - RNA, 22 nt, Artificial Sequence
  Synthetic
agaguuugaccugguaacccau

SEQ ID NO: 4663 - RNA, 22 nt, Artificial Sequence
  Synthetic
agcauggguuaccaggucaaac

SEQ ID NO: 4664 - RNA, 22 nt, Artificial Sequence
  Synthetic
aggucaaacucugccaccaccg

SEQ ID NO: 4665 - RNA, 22 nt, Artificial Sequence
  Synthetic
aguuccccacggugguggcaga

SEQ ID NO: 4666 - RNA, 22 nt, Artificial Sequence
  Synthetic
aucaaguuccccacgguggugg

SEQ ID NO: 4667 - RNA, 22 nt, Artificial Sequence
  Synthetic
auggguuaccaggucaaacucu

SEQ ID NO: 4668 - RNA, 22 nt, Artificial Sequence
  Synthetic
caaacucugccaccaccguggg

SEQ ID NO: 4669 - RNA, 22 nt, Artificial Sequence
  Synthetic
caaguuccccacggugguggca

SEQ ID NO: 4670 - RNA, 22 nt, Artificial Sequence
  Synthetic
cacagcauggguuaccagguca

SEQ ID NO: 4671 - RNA, 22 nt, Artificial Sequence
  Synthetic
cacggugguggcagaguuugac

SEQ ID NO: 4672 - RNA, 22 nt, Artificial Sequence
  Synthetic
cagaguuugaccugguaaccca

SEQ ID NO: 4673 - RNA, 22 nt, Artificial Sequence
  Synthetic
cagcauggguuaccaggucaaa

SEQ ID NO: 4674 - RNA, 22 nt, Artificial Sequence
  Synthetic
caggucaaacucugccaccacc

SEQ ID NO: 4675 - RNA, 22 nt, Artificial Sequence
  Synthetic
cauggguuaccaggucaaacuc

SEQ ID NO: 4676 - RNA, 22 nt, Artificial Sequence
  Synthetic
ccacggugguggcagaguuuga

SEQ ID NO: 4677 - RNA, 22 nt, Artificial Sequence
  Synthetic
ccaggucaaacucugccaccac

SEQ ID NO: 4678 - RNA, 22 nt, Artificial Sequence
  Synthetic
cccacggugguggcagaguuug

SEQ ID NO: 4679 - RNA, 22 nt, Artificial Sequence
  Synthetic
ccccacggugguggcagaguuu

SEQ ID NO: 4680 - RNA, 22 nt, Artificial Sequence
  Synthetic
cggugguggcagaguuugaccu

SEQ ID NO: 4681 - RNA, 22 nt, Artificial Sequence
  Synthetic
cucugccaccaccguggggaac

SEQ ID NO: 4682 - RNA, 22 nt, Artificial Sequence
  Synthetic
gaguuugaccugguaacccaug

SEQ ID NO: 4683 - RNA, 22 nt, Artificial Sequence
  Synthetic
gcagaguuugaccugguaaccc

SEQ ID NO: 4684 - RNA, 22 nt, Artificial Sequence
  Synthetic
gcauggguuaccaggucaaacu

SEQ ID NO: 4685 - RNA, 22 nt, Artificial Sequence
  Synthetic
ggcagaguuugaccugguaacc

SEQ ID NO: 4686 - RNA, 22 nt, Artificial Sequence
  Synthetic
ggguuaccaggucaaacucugc

SEQ ID NO: 4687 - RNA, 22 nt, Artificial Sequence
  Synthetic
ggucaaacucugccaccaccgu

SEQ ID NO: 4688 - RNA, 22 nt, Artificial Sequence
  Synthetic
gguggcagaguuugaccuggua

SEQ ID NO: 4689 - RNA, 22 nt, Artificial Sequence
  Synthetic
ggugguggcagaguuugaccug

SEQ ID NO: 4690 - RNA, 22 nt, Artificial Sequence
  Synthetic
gguuaccaggucaaacucugcc

SEQ ID NO: 4691 - RNA, 22 nt, Artificial Sequence
  Synthetic
gucaaacucugccaccaccgug

SEQ ID NO: 4692 - RNA, 22 nt, Artificial Sequence
  Synthetic
guggcagaguuugaccugguaa

SEQ ID NO: 4693 - RNA, 22 nt, Artificial Sequence
  Synthetic
gugguggcagaguuugaccugg

SEQ ID NO: 4694 - RNA, 22 nt, Artificial Sequence
  Synthetic
guuaccaggucaaacucugcca

SEQ ID NO: 4695 - RNA, 22 nt, Artificial Sequence
  Synthetic
guuccccacggugguggcagag

SEQ ID NO: 4696 - RNA, 22 nt, Artificial Sequence
  Synthetic
uaccaggucaaacucugccacc

SEQ ID NO: 4697 - RNA, 22 nt, Artificial Sequence
  Synthetic
ucaaacucugccaccaccgugg

SEQ ID NO: 4698 - RNA, 22 nt, Artificial Sequence
  Synthetic
ucaaguuccccacggugguggc

SEQ ID NO: 4699 - RNA, 22 nt, Artificial Sequence
  Synthetic
uccccacggugguggcagaguu

SEQ ID NO: 4700 - RNA, 22 nt, Artificial Sequence
  Synthetic
uggcagaguuugaccugguaac

SEQ ID NO: 4701 - RNA, 22 nt, Artificial Sequence
  Synthetic
uggguuaccaggucaaacucug

SEQ ID NO: 4702 - RNA, 22 nt, Artificial Sequence
  Synthetic
ugguggcagaguuugaccuggu

SEQ ID NO: 4703 - RNA, 22 nt, Artificial Sequence
  Synthetic
uuaccaggucaaacucugccac

SEQ ID NO: 4704 - RNA, 22 nt, Artificial Sequence
  Synthetic
uuccccacggugguggcagagu

SEQ ID NO: 4705 - RNA, 20 nt, Artificial Sequence
  Synthetic
aaacccugccaccaccaugg

SEQ ID NO: 4706 - RNA, 20 nt, Artificial Sequence
  Synthetic
aacccugccaccaccauggg

SEQ ID NO: 4707 - RNA, 20 nt, Artificial Sequence
  Synthetic
aaguuccccauggugguggc

SEQ ID NO: 4708 - RNA, 20 nt, Artificial Sequence
  Synthetic
aaucaaguuccccauggugg

SEQ ID NO: 4709 - RNA, 20 nt, Artificial Sequence
  Synthetic
accaccauggggaacuugau

SEQ ID NO: 4710 - RNA, 20 nt, Artificial Sequence
  Synthetic
accauggggaacuugauucg

SEQ ID NO: 4711 - RNA, 20 nt, Artificial Sequence
  Synthetic
acccugccaccaccaugggg

SEQ ID NO: 4712 - RNA, 20 nt, Artificial Sequence
  Synthetic
aggucaaacccugccaccac

SEQ ID NO: 4713 - RNA, 20 nt, Artificial Sequence
  Synthetic
aguuccccauggugguggca

SEQ ID NO: 4714 - RNA, 20 nt, Artificial Sequence
  Synthetic
aucaaguuccccaugguggu

SEQ ID NO: 4715 - RNA, 20 nt, Artificial Sequence
  Synthetic
auggugguggcaggguuuga

SEQ ID NO: 4716 - RNA, 20 nt, Artificial Sequence
  Synthetic
caaacccugccaccaccaug

SEQ ID NO: 4717 - RNA, 20 nt, Artificial Sequence
  Synthetic
caaguuccccaugguggugg

SEQ ID NO: 4718 - RNA, 20 nt, Artificial Sequence
  Synthetic
caccaccauggggaacuuga

SEQ ID NO: 4719 - RNA, 20 nt, Artificial Sequence
  Synthetic
caccauggggaacuugauuc

SEQ ID NO: 4720 - RNA, 20 nt, Artificial Sequence
  Synthetic
caggucaaacccugccacca

SEQ ID NO: 4721 - RNA, 20 nt, Artificial Sequence
  Synthetic
cauggggaacuugauucgga

SEQ ID NO: 4722 - RNA, 20 nt, Artificial Sequence
  Synthetic
cauggugguggcaggguuug

SEQ ID NO: 4723 - RNA, 20 nt, Artificial Sequence
  Synthetic
ccaccaccauggggaacuug

SEQ ID NO: 4724 - RNA, 20 nt, Artificial Sequence
  Synthetic
ccaccauggggaacuugauu

SEQ ID NO: 4725 - RNA, 20 nt, Artificial Sequence
  Synthetic
ccaggucaaacccugccacc

SEQ ID NO: 4726 - RNA, 20 nt, Artificial Sequence
  Synthetic
ccauggggaacuugauucgg

SEQ ID NO: 4727 - RNA, 20 nt, Artificial Sequence
  Synthetic
ccauggugguggcaggguuu

SEQ ID NO: 4728 - RNA, 20 nt, Artificial Sequence
  Synthetic
cccauggugguggcaggguu

SEQ ID NO: 4729 - RNA, 20 nt, Artificial Sequence
  Synthetic
ccccauggugguggcagggu

SEQ ID NO: 4730 - RNA, 20 nt, Artificial Sequence
  Synthetic
cccugccaccaccaugggga

SEQ ID NO: 4731 - RNA, 20 nt, Artificial Sequence
  Synthetic
ccgaaucaaguuccccaugg

SEQ ID NO: 4732 - RNA, 20 nt, Artificial Sequence
  Synthetic
ccugccaccaccauggggaa

SEQ ID NO: 4733 - RNA, 20 nt, Artificial Sequence
  Synthetic
cgaaucaaguuccccauggu

SEQ ID NO: 4734 - RNA, 20 nt, Artificial Sequence
  Synthetic
cuccgaaucaaguuccccau

SEQ ID NO: 4735 - RNA, 20 nt, Artificial Sequence
  Synthetic
cugccaccaccauggggaac

SEQ ID NO: 4736 - RNA, 20 nt, Artificial Sequence
  Synthetic
gaaucaaguuccccauggug

SEQ ID NO: 4737 - RNA, 20 nt, Artificial Sequence
  Synthetic
gccaccaccauggggaacuu

SEQ ID NO: 4738 - RNA, 20 nt, Artificial Sequence
  Synthetic
gcuccgaaucaaguucccca

SEQ ID NO: 4739 - RNA, 20 nt, Artificial Sequence
  Synthetic
ggcuccgaaucaaguucccc

SEQ ID NO: 4740 - RNA, 20 nt, Artificial Sequence
  Synthetic
gggcuccgaaucaaguuccc

SEQ ID NO: 4741 - RNA, 20 nt, Artificial Sequence
  Synthetic
ggggcuccgaaucaaguucc

SEQ ID NO: 4742 - RNA, 20 nt, Artificial Sequence
  Synthetic
ggucaaacccugccaccacc

SEQ ID NO: 4743 - RNA, 20 nt, Artificial Sequence
  Synthetic
gucaaacccugccaccacca

SEQ ID NO: 4744 - RNA, 20 nt, Artificial Sequence
  Synthetic
guuccccauggugguggcag

SEQ ID NO: 4745 - RNA, 20 nt, Artificial Sequence
  Synthetic
ucaaacccugccaccaccau

SEQ ID NO: 4746 - RNA, 20 nt, Artificial Sequence
  Synthetic
ucaaguuccccaugguggug

SEQ ID NO: 4747 - RNA, 20 nt, Artificial Sequence
  Synthetic
uccccauggugguggcaggg

SEQ ID NO: 4748 - RNA, 20 nt, Artificial Sequence
  Synthetic
uccgaaucaaguuccccaug

SEQ ID NO: 4749 - RNA, 20 nt, Artificial Sequence
  Synthetic
ugccaccaccauggggaacu

SEQ ID NO: 4750 - RNA, 20 nt, Artificial Sequence
  Synthetic
uuccccauggugguggcagg

SEQ ID NO: 4751 - RNA, 21 nt, Artificial Sequence
  Synthetic
aaacccugccaccaccauggg

SEQ ID NO: 4752 - RNA, 21 nt, Artificial Sequence
  Synthetic
aacccugccaccaccaugggg

SEQ ID NO: 4753 - RNA, 21 nt, Artificial Sequence
  Synthetic
aaguuccccauggugguggca

SEQ ID NO: 4754 - RNA, 21 nt, Artificial Sequence
  Synthetic
aaucaaguuccccaugguggu

SEQ ID NO: 4755 - RNA, 21 nt, Artificial Sequence
  Synthetic
accaccauggggaacuugauu

SEQ ID NO: 4756 - RNA, 21 nt, Artificial Sequence
  Synthetic
accaggucaaacccugccacc

SEQ ID NO: 4757 - RNA, 21 nt, Artificial Sequence
  Synthetic
accauggggaacuugauucgg

SEQ ID NO: 4758 - RNA, 21 nt, Artificial Sequence
  Synthetic
acccugccaccaccaugggga

SEQ ID NO: 4759 - RNA, 21 nt, Artificial Sequence
  Synthetic
aggucaaacccugccaccacc

SEQ ID NO: 4760 - RNA, 21 nt, Artificial Sequence
  Synthetic
aguuccccauggugguggcag

SEQ ID NO: 4761 - RNA, 21 nt, Artificial Sequence
  Synthetic
aucaaguuccccaugguggug

SEQ ID NO: 4762 - RNA, 21 nt, Artificial Sequence
  Synthetic
auggugguggcaggguuugac

SEQ ID NO: 4763 - RNA, 21 nt, Artificial Sequence
  Synthetic
caaacccugccaccaccaugg

SEQ ID NO: 4764 - RNA, 21 nt, Artificial Sequence
  Synthetic
caaguuccccauggugguggc

SEQ ID NO: 4765 - RNA, 21 nt, Artificial Sequence
  Synthetic
caccaccauggggaacuugau

SEQ ID NO: 4766 - RNA, 21 nt, Artificial Sequence
  Synthetic
caccauggggaacuugauucg

SEQ ID NO: 4767 - RNA, 21 nt, Artificial Sequence
  Synthetic
caggucaaacccugccaccac

SEQ ID NO: 4768 - RNA, 21 nt, Artificial Sequence
  Synthetic
cauggggaacuugauucggag

SEQ ID NO: 4769 - RNA, 21 nt, Artificial Sequence
  Synthetic
cauggugguggcaggguuuga

SEQ ID NO: 4770 - RNA, 21 nt, Artificial Sequence
  Synthetic
ccaccaccauggggaacuuga

SEQ ID NO: 4771 - RNA, 21 nt, Artificial Sequence
  Synthetic
ccaccauggggaacuugauuc

SEQ ID NO: 4772 - RNA, 21 nt, Artificial Sequence
  Synthetic
ccaggucaaacccugccacca

SEQ ID NO: 4773 - RNA, 21 nt, Artificial Sequence
  Synthetic
ccauggggaacuugauucgga

SEQ ID NO: 4774 - RNA, 21 nt, Artificial Sequence
  Synthetic
ccauggugguggcaggguuug

SEQ ID NO: 4775 - RNA, 21 nt, Artificial Sequence
  Synthetic
cccauggugguggcaggguuu

SEQ ID NO: 4776 - RNA, 21 nt, Artificial Sequence
  Synthetic
ccccauggugguggcaggguu

SEQ ID NO: 4777 - RNA, 21 nt, Artificial Sequence
  Synthetic
cccugccaccaccauggggaa

SEQ ID NO: 4778 - RNA, 21 nt, Artificial Sequence
  Synthetic
ccgaaucaaguuccccauggu

SEQ ID NO: 4779 - RNA, 21 nt, Artificial Sequence
  Synthetic
ccugccaccaccauggggaac

SEQ ID NO: 4780 - RNA, 21 nt, Artificial Sequence
  Synthetic
cgaaucaaguuccccauggug

SEQ ID NO: 4781 - RNA, 21 nt, Artificial Sequence
  Synthetic
cuccgaaucaaguuccccaug

SEQ ID NO: 4782 - RNA, 21 nt, Artificial Sequence
  Synthetic
cugccaccaccauggggaacu

SEQ ID NO: 4783 - RNA, 21 nt, Artificial Sequence
  Synthetic
gaaucaaguuccccauggugg

SEQ ID NO: 4784 - RNA, 21 nt, Artificial Sequence
  Synthetic
gccaccaccauggggaacuug

SEQ ID NO: 4785 - RNA, 21 nt, Artificial Sequence
  Synthetic
gcuccgaaucaaguuccccau

SEQ ID NO: 4786 - RNA, 21 nt, Artificial Sequence
  Synthetic
ggcuccgaaucaaguucccca

SEQ ID NO: 4787 - RNA, 21 nt, Artificial Sequence
  Synthetic
gggcuccgaaucaaguucccc

SEQ ID NO: 4788 - RNA, 21 nt, Artificial Sequence
  Synthetic
ggggcuccgaaucaaguuccc

SEQ ID NO: 4789 - RNA, 21 nt, Artificial Sequence
  Synthetic
ggucaaacccugccaccacca

SEQ ID NO: 4790 - RNA, 21 nt, Artificial Sequence
  Synthetic
gucaaacccugccaccaccau

SEQ ID NO: 4791 - RNA, 21 nt, Artificial Sequence
  Synthetic
guuccccauggugguggcagg

SEQ ID NO: 4792 - RNA, 21 nt, Artificial Sequence
  Synthetic
ucaaacccugccaccaccaug

SEQ ID NO: 4793 - RNA, 21 nt, Artificial Sequence
  Synthetic
ucaaguuccccaugguggugg

SEQ ID NO: 4794 - RNA, 21 nt, Artificial Sequence
  Synthetic
uccccauggugguggcagggu

SEQ ID NO: 4795 - RNA, 21 nt, Artificial Sequence
  Synthetic
uccgaaucaaguuccccaugg

SEQ ID NO: 4796 - RNA, 21 nt, Artificial Sequence
  Synthetic
ugccaccaccauggggaacuu

SEQ ID NO: 4797 - RNA, 21 nt, Artificial Sequence
  Synthetic
uggggcuccgaaucaaguucc

SEQ ID NO: 4798 - RNA, 21 nt, Artificial Sequence
  Synthetic
uuccccauggugguggcaggg

SEQ ID NO: 4799 - RNA, 22 nt, Artificial Sequence
  Synthetic
aaacccugccaccaccaugggg

SEQ ID NO: 4800 - RNA, 22 nt, Artificial Sequence
  Synthetic
aacccugccaccaccaugggga

SEQ ID NO: 4801 - RNA, 22 nt, Artificial Sequence
  Synthetic
aaguuccccauggugguggcag

SEQ ID NO: 4802 - RNA, 22 nt, Artificial Sequence
  Synthetic
aaucaaguuccccaugguggug

SEQ ID NO: 4803 - RNA, 22 nt, Artificial Sequence
  Synthetic
accaccauggggaacuugauuc

SEQ ID NO: 4804 - RNA, 22 nt, Artificial Sequence
  Synthetic
accaggucaaacccugccacca

SEQ ID NO: 4805 - RNA, 22 nt, Artificial Sequence
  Synthetic
accauggggaacuugauucgga

SEQ ID NO: 4806 - RNA, 22 nt, Artificial Sequence
  Synthetic
acccugccaccaccauggggaa

SEQ ID NO: 4807 - RNA, 22 nt, Artificial Sequence
  Synthetic
aggucaaacccugccaccacca

SEQ ID NO: 4808 - RNA, 22 nt, Artificial Sequence
  Synthetic
aguuccccauggugguggcagg

SEQ ID NO: 4809 - RNA, 22 nt, Artificial Sequence
  Synthetic
aucaaguuccccaugguggugg

SEQ ID NO: 4810 - RNA, 22 nt, Artificial Sequence
  Synthetic
auggggcuccgaaucaaguucc

SEQ ID NO: 4811 - RNA, 22 nt, Artificial Sequence
  Synthetic
auggugguggcaggguuugacc

SEQ ID NO: 4812 - RNA, 22 nt, Artificial Sequence
  Synthetic
caaacccugccaccaccauggg

SEQ ID NO: 4813 - RNA, 22 nt, Artificial Sequence
  Synthetic
caaguuccccauggugguggca

SEQ ID NO: 4814 - RNA, 22 nt, Artificial Sequence
  Synthetic
caccaccauggggaacuugauu

SEQ ID NO: 4815 - RNA, 22 nt, Artificial Sequence
  Synthetic
caccauggggaacuugauucgg

SEQ ID NO: 4816 - RNA, 22 nt, Artificial Sequence
  Synthetic
caggucaaacccugccaccacc

SEQ ID NO: 4817 - RNA, 22 nt, Artificial Sequence
  Synthetic
cauggggaacuugauucggagc

SEQ ID NO: 4818 - RNA, 22 nt, Artificial Sequence
  Synthetic
cauggugguggcaggguuugac

SEQ ID NO: 4819 - RNA, 22 nt, Artificial Sequence
  Synthetic
ccaccaccauggggaacuugau

SEQ ID NO: 4820 - RNA, 22 nt, Artificial Sequence
  Synthetic
ccaccauggggaacuugauucg

SEQ ID NO: 4821 - RNA, 22 nt, Artificial Sequence
  Synthetic
ccaggucaaacccugccaccac

SEQ ID NO: 4822 - RNA, 22 nt, Artificial Sequence
  Synthetic
ccauggggaacuugauucggag

SEQ ID NO: 4823 - RNA, 22 nt, Artificial Sequence
  Synthetic
ccauggugguggcaggguuuga

SEQ ID NO: 4824 - RNA, 22 nt, Artificial Sequence
  Synthetic
cccauggugguggcaggguuug

SEQ ID NO: 4825 - RNA, 22 nt, Artificial Sequence
  Synthetic
ccccauggugguggcaggguuu

SEQ ID NO: 4826 - RNA, 22 nt, Artificial Sequence
  Synthetic
cccugccaccaccauggggaac

SEQ ID NO: 4827 - RNA, 22 nt, Artificial Sequence
  Synthetic
ccgaaucaaguuccccauggug

SEQ ID NO: 4828 - RNA, 22 nt, Artificial Sequence
  Synthetic
ccugccaccaccauggggaacu

SEQ ID NO: 4829 - RNA, 22 nt, Artificial Sequence
  Synthetic
cgaaucaaguuccccauggugg

SEQ ID NO: 4830 - RNA, 22 nt, Artificial Sequence
  Synthetic
cuccgaaucaaguuccccaugg

SEQ ID NO: 4831 - RNA, 22 nt, Artificial Sequence
  Synthetic
cugccaccaccauggggaacuu

SEQ ID NO: 4832 - RNA, 22 nt, Artificial Sequence
  Synthetic
gaaucaaguuccccaugguggu

SEQ ID NO: 4833 - RNA, 22 nt, Artificial Sequence
  Synthetic
gccaccaccauggggaacuuga

SEQ ID NO: 4834 - RNA, 22 nt, Artificial Sequence
  Synthetic
gcuccgaaucaaguuccccaug

SEQ ID NO: 4835 - RNA, 22 nt, Artificial Sequence
  Synthetic
ggcuccgaaucaaguuccccau

SEQ ID NO: 4836 - RNA, 22 nt, Artificial Sequence
  Synthetic
gggcuccgaaucaaguucccca

SEQ ID NO: 4837 - RNA, 22 nt, Artificial Sequence
  Synthetic
ggggcuccgaaucaaguucccc

SEQ ID NO: 4838 - RNA, 22 nt, Artificial Sequence
  Synthetic
ggucaaacccugccaccaccau

SEQ ID NO: 4839 - RNA, 22 nt, Artificial Sequence
  Synthetic
gucaaacccugccaccaccaug

SEQ ID NO: 4840 - RNA, 22 nt, Artificial Sequence
  Synthetic
guuccccauggugguggcaggg

SEQ ID NO: 4841 - RNA, 22 nt, Artificial Sequence
  Synthetic
uaccaggucaaacccugccacc

SEQ ID NO: 4842 - RNA, 22 nt, Artificial Sequence
  Synthetic
ucaaacccugccaccaccaugg

SEQ ID NO: 4843 - RNA, 22 nt, Artificial Sequence
  Synthetic
ucaaguuccccauggugguggc

SEQ ID NO: 4844 - RNA, 22 nt, Artificial Sequence
  Synthetic
uccccauggugguggcaggguu

SEQ ID NO: 4845 - RNA, 22 nt, Artificial Sequence
  Synthetic
uccgaaucaaguuccccauggu

SEQ ID NO: 4846 - RNA, 22 nt, Artificial Sequence
  Synthetic
ugccaccaccauggggaacuug

SEQ ID NO: 4847 - RNA, 22 nt, Artificial Sequence
  Synthetic
uggggcuccgaaucaaguuccc

SEQ ID NO: 4848 - RNA, 22 nt, Artificial Sequence
  Synthetic
uuccccauggugguggcagggu

SEQ ID NO: 4849 - RNA, 20 nt, Artificial Sequence
  Synthetic
aacuugauugggagccccau

SEQ ID NO: 4850 - RNA, 20 nt, Artificial Sequence
  Synthetic
aauggccauggggcucccaa

SEQ ID NO: 4851 - RNA, 20 nt, Artificial Sequence
  Synthetic
accaccguggggaacuugau

SEQ ID NO: 4852 - RNA, 20 nt, Artificial Sequence
  Synthetic
accguggggaacuugauugg

SEQ ID NO: 4853 - RNA, 20 nt, Artificial Sequence
  Synthetic
acuugauugggagccccaug

SEQ ID NO: 4854 - RNA, 20 nt, Artificial Sequence
  Synthetic
auccgaauggccauggggcu

SEQ ID NO: 4855 - RNA, 20 nt, Artificial Sequence
  Synthetic
auggccauggggcucccaau

SEQ ID NO: 4856 - RNA, 20 nt, Artificial Sequence
  Synthetic
auggggcucccaaucaaguu

SEQ ID NO: 4857 - RNA, 20 nt, Artificial Sequence
  Synthetic
auugggagccccauggccau

SEQ ID NO: 4858 - RNA, 20 nt, Artificial Sequence
  Synthetic
caccaccguggggaacuuga

SEQ ID NO: 4859 - RNA, 20 nt, Artificial Sequence
  Synthetic
caccguggggaacuugauug

SEQ ID NO: 4860 - RNA, 20 nt, Artificial Sequence
  Synthetic
cauccgaauggccauggggc

SEQ ID NO: 4861 - RNA, 20 nt, Artificial Sequence
  Synthetic
cauggggcucccaaucaagu

SEQ ID NO: 4862 - RNA, 20 nt, Artificial Sequence
  Synthetic
ccaaucaaguuccccacggu

SEQ ID NO: 4863 - RNA, 20 nt, Artificial Sequence
  Synthetic
ccaccaccguggggaacuug

SEQ ID NO: 4864 - RNA, 20 nt, Artificial Sequence
  Synthetic
ccaccguggggaacuugauu

SEQ ID NO: 4865 - RNA, 20 nt, Artificial Sequence
  Synthetic
ccauggggcucccaaucaag

SEQ ID NO: 4866 - RNA, 20 nt, Artificial Sequence
  Synthetic
cccaaucaaguuccccacgg

SEQ ID NO: 4867 - RNA, 20 nt, Artificial Sequence
  Synthetic
ccgaauggccauggggcucc

SEQ ID NO: 4868 - RNA, 20 nt, Artificial Sequence
  Synthetic
ccguggggaacuugauuggg

SEQ ID NO: 4869 - RNA, 20 nt, Artificial Sequence
  Synthetic
cgaauggccauggggcuccc

SEQ ID NO: 4870 - RNA, 20 nt, Artificial Sequence
  Synthetic
cguggggaacuugauuggga

SEQ ID NO: 4871 - RNA, 20 nt, Artificial Sequence
  Synthetic
cucccaaucaaguuccccac

SEQ ID NO: 4872 - RNA, 20 nt, Artificial Sequence
  Synthetic
cuugauugggagccccaugg

SEQ ID NO: 4873 - RNA, 20 nt, Artificial Sequence
  Synthetic
gaacuugauugggagcccca

SEQ ID NO: 4874 - RNA, 20 nt, Artificial Sequence
  Synthetic
gaauggccauggggcuccca

SEQ ID NO: 4875 - RNA, 20 nt, Artificial Sequence
  Synthetic
gauugggagccccauggcca

SEQ ID NO: 4876 - RNA, 20 nt, Artificial Sequence
  Synthetic
gccauggggcucccaaucaa

SEQ ID NO: 4877 - RNA, 20 nt, Artificial Sequence
  Synthetic
gcucccaaucaaguucccca

SEQ ID NO: 4878 - RNA, 20 nt, Artificial Sequence
  Synthetic
ggaacuugauugggagcccc

SEQ ID NO: 4879 - RNA, 20 nt, Artificial Sequence
  Synthetic
ggccauggggcucccaauca

SEQ ID NO: 4880 - RNA, 20 nt, Artificial Sequence
  Synthetic
ggcucccaaucaaguucccc

SEQ ID NO: 4881 - RNA, 20 nt, Artificial Sequence
  Synthetic
gggaacuugauugggagccc

SEQ ID NO: 4882 - RNA, 20 nt, Artificial Sequence
  Synthetic
gggcucccaaucaaguuccc

SEQ ID NO: 4883 - RNA, 20 nt, Artificial Sequence
  Synthetic
ggggaacuugauugggagcc

SEQ ID NO: 4884 - RNA, 20 nt, Artificial Sequence
  Synthetic
ggggcucccaaucaaguucc

SEQ ID NO: 4885 - RNA, 20 nt, Artificial Sequence
  Synthetic
guggggaacuugauugggag

SEQ ID NO: 4886 - RNA, 20 nt, Artificial Sequence
  Synthetic
ucccaaucaaguuccccacg

SEQ ID NO: 4887 - RNA, 20 nt, Artificial Sequence
  Synthetic
uccgaauggccauggggcuc

SEQ ID NO: 4888 - RNA, 20 nt, Artificial Sequence
  Synthetic
ugauugggagccccauggcc

SEQ ID NO: 4889 - RNA, 20 nt, Artificial Sequence
  Synthetic
uggccauggggcucccaauc

SEQ ID NO: 4890 - RNA, 20 nt, Artificial Sequence
  Synthetic
ugggagccccauggccauuc

SEQ ID NO: 4891 - RNA, 20 nt, Artificial Sequence
  Synthetic
uggggaacuugauugggagc

SEQ ID NO: 4892 - RNA, 20 nt, Artificial Sequence
  Synthetic
uggggcucccaaucaaguuc

SEQ ID NO: 4893 - RNA, 20 nt, Artificial Sequence
  Synthetic
uugauugggagccccauggc

SEQ ID NO: 4894 - RNA, 20 nt, Artificial Sequence
  Synthetic
uugggagccccauggccauu

SEQ ID NO: 4895 - RNA, 21 nt, Artificial Sequence
  Synthetic
aacuugauugggagccccaug

SEQ ID NO: 4896 - RNA, 21 nt, Artificial Sequence
  Synthetic
aauggccauggggcucccaau

SEQ ID NO: 4897 - RNA, 21 nt, Artificial Sequence
  Synthetic
accaccguggggaacuugauu

SEQ ID NO: 4898 - RNA, 21 nt, Artificial Sequence
  Synthetic
accguggggaacuugauuggg

SEQ ID NO: 4899 - RNA, 21 nt, Artificial Sequence
  Synthetic
acuugauugggagccccaugg

SEQ ID NO: 4900 - RNA, 21 nt, Artificial Sequence
  Synthetic
auccgaauggccauggggcuc

SEQ ID NO: 4901 - RNA, 21 nt, Artificial Sequence
  Synthetic
auggccauggggcucccaauc

SEQ ID NO: 4902 - RNA, 21 nt, Artificial Sequence
  Synthetic
auggggcucccaaucaaguuc

SEQ ID NO: 4903 - RNA, 21 nt, Artificial Sequence
  Synthetic
auugggagccccauggccauu

SEQ ID NO: 4904 - RNA, 21 nt, Artificial Sequence
  Synthetic
caccaccguggggaacuugau

SEQ ID NO: 4905 - RNA, 21 nt, Artificial Sequence
  Synthetic
caccguggggaacuugauugg

SEQ ID NO: 4906 - RNA, 21 nt, Artificial Sequence
  Synthetic
cauccgaauggccauggggcu

SEQ ID NO: 4907 - RNA, 21 nt, Artificial Sequence
  Synthetic
cauggggcucccaaucaaguu

SEQ ID NO: 4908 - RNA, 21 nt, Artificial Sequence
  Synthetic
ccaaucaaguuccccacggug

SEQ ID NO: 4909 - RNA, 21 nt, Artificial Sequence
  Synthetic
ccaccaccguggggaacuuga

SEQ ID NO: 4910 - RNA, 21 nt, Artificial Sequence
  Synthetic
ccaccguggggaacuugauug

SEQ ID NO: 4911 - RNA, 21 nt, Artificial Sequence
  Synthetic
ccauccgaauggccauggggc

SEQ ID NO: 4912 - RNA, 21 nt, Artificial Sequence
  Synthetic
ccauggggcucccaaucaagu

SEQ ID NO: 4913 - RNA, 21 nt, Artificial Sequence
  Synthetic
cccaaucaaguuccccacggu

SEQ ID NO: 4914 - RNA, 21 nt, Artificial Sequence
  Synthetic
ccgaauggccauggggcuccc

SEQ ID NO: 4915 - RNA, 21 nt, Artificial Sequence
  Synthetic
ccguggggaacuugauuggga

SEQ ID NO: 4916 - RNA, 21 nt, Artificial Sequence
  Synthetic
cgaauggccauggggcuccca

SEQ ID NO: 4917 - RNA, 21 nt, Artificial Sequence
  Synthetic
cguggggaacuugauugggag

SEQ ID NO: 4918 - RNA, 21 nt, Artificial Sequence
  Synthetic
cucccaaucaaguuccccacg

SEQ ID NO: 4919 - RNA, 21 nt, Artificial Sequence
  Synthetic
cuugauugggagccccauggc

SEQ ID NO: 4920 - RNA, 21 nt, Artificial Sequence
  Synthetic
gaacuugauugggagccccau

SEQ ID NO: 4921 - RNA, 21 nt, Artificial Sequence
  Synthetic
gaauggccauggggcucccaa

SEQ ID NO: 4922 - RNA, 21 nt, Artificial Sequence
  Synthetic
gauugggagccccauggccau

SEQ ID NO: 4923 - RNA, 21 nt, Artificial Sequence
  Synthetic
gccaccaccguggggaacuug

SEQ ID NO: 4924 - RNA, 21 nt, Artificial Sequence
  Synthetic
gccauggggcucccaaucaag

SEQ ID NO: 4925 - RNA, 21 nt, Artificial Sequence
  Synthetic
gcucccaaucaaguuccccac

SEQ ID NO: 4926 - RNA, 21 nt, Artificial Sequence
  Synthetic
ggaacuugauugggagcccca

SEQ ID NO: 4927 - RNA, 21 nt, Artificial Sequence
  Synthetic
ggccauggggcucccaaucaa

SEQ ID NO: 4928 - RNA, 21 nt, Artificial Sequence
  Synthetic
ggcucccaaucaaguucccca

SEQ ID NO: 4929 - RNA, 21 nt, Artificial Sequence
  Synthetic
gggaacuugauugggagcccc

SEQ ID NO: 4930 - RNA, 21 nt, Artificial Sequence
  Synthetic
gggcucccaaucaaguucccc

SEQ ID NO: 4931 - RNA, 21 nt, Artificial Sequence
  Synthetic
ggggaacuugauugggagccc

SEQ ID NO: 4932 - RNA, 21 nt, Artificial Sequence
  Synthetic
ggggcucccaaucaaguuccc

SEQ ID NO: 4933 - RNA, 21 nt, Artificial Sequence
  Synthetic
guggggaacuugauugggagc

SEQ ID NO: 4934 - RNA, 21 nt, Artificial Sequence
  Synthetic
ucccaaucaaguuccccacgg

SEQ ID NO: 4935 - RNA, 21 nt, Artificial Sequence
  Synthetic
uccgaauggccauggggcucc

SEQ ID NO: 4936 - RNA, 21 nt, Artificial Sequence
  Synthetic
ugauugggagccccauggcca

SEQ ID NO: 4937 - RNA, 21 nt, Artificial Sequence
  Synthetic
uggccauggggcucccaauca

SEQ ID NO: 4938 - RNA, 21 nt, Artificial Sequence
  Synthetic
ugggagccccauggccauucg

SEQ ID NO: 4939 - RNA, 21 nt, Artificial Sequence
  Synthetic
uggggaacuugauugggagcc

SEQ ID NO: 4940 - RNA, 21 nt, Artificial Sequence
  Synthetic
uggggcucccaaucaaguucc

SEQ ID NO: 4941 - RNA, 21 nt, Artificial Sequence
  Synthetic
uugauugggagccccauggcc

SEQ ID NO: 4942 - RNA, 21 nt, Artificial Sequence
  Synthetic
uugggagccccauggccauuc

SEQ ID NO: 4943 - RNA, 22 nt, Artificial Sequence
  Synthetic
aacuugauugggagccccaugg

SEQ ID NO: 4944 - RNA, 22 nt, Artificial Sequence
  Synthetic
aauggccauggggcucccaauc

SEQ ID NO: 4945 - RNA, 22 nt, Artificial Sequence
  Synthetic
accaccguggggaacuugauug

SEQ ID NO: 4946 - RNA, 22 nt, Artificial Sequence
  Synthetic
accguggggaacuugauuggga

SEQ ID NO: 4947 - RNA, 22 nt, Artificial Sequence
  Synthetic
acuugauugggagccccauggc

SEQ ID NO: 4948 - RNA, 22 nt, Artificial Sequence
  Synthetic
auccgaauggccauggggcucc

SEQ ID NO: 4949 - RNA, 22 nt, Artificial Sequence
  Synthetic
auggccauggggcucccaauca

SEQ ID NO: 4950 - RNA, 22 nt, Artificial Sequence
  Synthetic
auggggcucccaaucaaguucc

SEQ ID NO: 4951 - RNA, 22 nt, Artificial Sequence
  Synthetic
auugggagccccauggccauuc

SEQ ID NO: 4952 - RNA, 22 nt, Artificial Sequence
  Synthetic
caccaccguggggaacuugauu

SEQ ID NO: 4953 - RNA, 22 nt, Artificial Sequence
  Synthetic
caccguggggaacuugauuggg

SEQ ID NO: 4954 - RNA, 22 nt, Artificial Sequence
  Synthetic
cauccgaauggccauggggcuc

SEQ ID NO: 4955 - RNA, 22 nt, Artificial Sequence
  Synthetic
cauggggcucccaaucaaguuc

SEQ ID NO: 4956 - RNA, 22 nt, Artificial Sequence
  Synthetic
ccaaucaaguuccccacggugg

SEQ ID NO: 4957 - RNA, 22 nt, Artificial Sequence
  Synthetic
ccaccaccguggggaacuugau

SEQ ID NO: 4958 - RNA, 22 nt, Artificial Sequence
  Synthetic
ccaccguggggaacuugauugg

SEQ ID NO: 4959 - RNA, 22 nt, Artificial Sequence
  Synthetic
ccauccgaauggccauggggcu

SEQ ID NO: 4960 - RNA, 22 nt, Artificial Sequence
  Synthetic
ccauggggcucccaaucaaguu

SEQ ID NO: 4961 - RNA, 22 nt, Artificial Sequence
  Synthetic
cccaaucaaguuccccacggug

SEQ ID NO: 4962 - RNA, 22 nt, Artificial Sequence
  Synthetic
ccgaauggccauggggcuccca

SEQ ID NO: 4963 - RNA, 22 nt, Artificial Sequence
  Synthetic
ccguggggaacuugauugggag

SEQ ID NO: 4964 - RNA, 22 nt, Artificial Sequence
  Synthetic
cgaauggccauggggcucccaa

SEQ ID NO: 4965 - RNA, 22 nt, Artificial Sequence
  Synthetic
cguggggaacuugauugggagc

SEQ ID NO: 4966 - RNA, 22 nt, Artificial Sequence
  Synthetic
cucccaaucaaguuccccacgg

SEQ ID NO: 4967 - RNA, 22 nt, Artificial Sequence
  Synthetic
cuugauugggagccccauggcc

SEQ ID NO: 4968 - RNA, 22 nt, Artificial Sequence
  Synthetic
gaacuugauugggagccccaug

SEQ ID NO: 4969 - RNA, 22 nt, Artificial Sequence
  Synthetic
gaauggccauggggcucccaau

SEQ ID NO: 4970 - RNA, 22 nt, Artificial Sequence
  Synthetic
gauugggagccccauggccauu

SEQ ID NO: 4971 - RNA, 22 nt, Artificial Sequence
  Synthetic
gccaccaccguggggaacuuga

SEQ ID NO: 4972 - RNA, 22 nt, Artificial Sequence
  Synthetic
gccauggggcucccaaucaagu

SEQ ID NO: 4973 - RNA, 22 nt, Artificial Sequence
  Synthetic
gcucccaaucaaguuccccacg

SEQ ID NO: 4974 - RNA, 22 nt, Artificial Sequence
  Synthetic
ggaacuugauugggagccccau

SEQ ID NO: 4975 - RNA, 22 nt, Artificial Sequence
  Synthetic
ggccauggggcucccaaucaag

SEQ ID NO: 4976 - RNA, 22 nt, Artificial Sequence
  Synthetic
ggcucccaaucaaguuccccac

SEQ ID NO: 4977 - RNA, 22 nt, Artificial Sequence
  Synthetic
gggaacuugauugggagcccca

SEQ ID NO: 4978 - RNA, 22 nt, Artificial Sequence
  Synthetic
gggcucccaaucaaguucccca

SEQ ID NO: 4979 - RNA, 22 nt, Artificial Sequence
  Synthetic
ggggaacuugauugggagcccc

SEQ ID NO: 4980 - RNA, 22 nt, Artificial Sequence
  Synthetic
ggggcucccaaucaaguucccc

SEQ ID NO: 4981 - RNA, 22 nt, Artificial Sequence
  Synthetic
guggggaacuugauugggagcc

SEQ ID NO: 4982 - RNA, 22 nt, Artificial Sequence
  Synthetic
uccauccgaauggccauggggc

SEQ ID NO: 4983 - RNA, 22 nt, Artificial Sequence
  Synthetic
ucccaaucaaguuccccacggu

SEQ ID NO: 4984 - RNA, 22 nt, Artificial Sequence
  Synthetic
uccgaauggccauggggcuccc

SEQ ID NO: 4985 - RNA, 22 nt, Artificial Sequence
  Synthetic
ugauugggagccccauggccau

SEQ ID NO: 4986 - RNA, 22 nt, Artificial Sequence
  Synthetic
ugccaccaccguggggaacuug

SEQ ID NO: 4987 - RNA, 22 nt, Artificial Sequence
  Synthetic
uggccauggggcucccaaucaa

SEQ ID NO: 4988 - RNA, 22 nt, Artificial Sequence
  Synthetic
ugggagccccauggccauucgg

SEQ ID NO: 4989 - RNA, 22 nt, Artificial Sequence
  Synthetic
uggggaacuugauugggagccc

SEQ ID NO: 4990 - RNA, 22 nt, Artificial Sequence
  Synthetic
uggggcucccaaucaaguuccc

SEQ ID NO: 4991 - RNA, 22 nt, Artificial Sequence
  Synthetic
uugauugggagccccauggcca

SEQ ID NO: 4992 - RNA, 22 nt, Artificial Sequence
  Synthetic
uugggagccccauggccauucg

SEQ ID NO: 4993 - RNA, 20 nt, Artificial Sequence
  Synthetic
aacuugauucggcgccccau

SEQ ID NO: 4994 - RNA, 20 nt, Artificial Sequence
  Synthetic
aauggccauggggcgccgaa

SEQ ID NO: 4995 - RNA, 20 nt, Artificial Sequence
  Synthetic
accguggggaacuugauucg

SEQ ID NO: 4996 - RNA, 20 nt, Artificial Sequence
  Synthetic
acuugauucggcgccccaug

SEQ ID NO: 4997 - RNA, 20 nt, Artificial Sequence
  Synthetic
auccauccgaauggccaugg

SEQ ID NO: 4998 - RNA, 20 nt, Artificial Sequence
  Synthetic
auccgaauggccauggggcg

SEQ ID NO: 4999 - RNA, 20 nt, Artificial Sequence
  Synthetic
auggccauggggcgccgaau

SEQ ID NO: 5000 - RNA, 20 nt, Artificial Sequence
  Synthetic
auggggcgccgaaucaaguu

SEQ ID NO: 5001 - RNA, 20 nt, Artificial Sequence
  Synthetic
auucggcgccccauggccau

SEQ ID NO: 5002 - RNA, 20 nt, Artificial Sequence
  Synthetic
caccguggggaacuugauuc

SEQ ID NO: 5003 - RNA, 20 nt, Artificial Sequence
  Synthetic
cauggggcgccgaaucaagu

SEQ ID NO: 5004 - RNA, 20 nt, Artificial Sequence
  Synthetic
ccauccgaauggccaugggg

SEQ ID NO: 5005 - RNA, 20 nt, Artificial Sequence
  Synthetic
ccauggggcgccgaaucaag

SEQ ID NO: 5006 - RNA, 20 nt, Artificial Sequence
  Synthetic
ccgaauggccauggggcgcc

SEQ ID NO: 5007 - RNA, 20 nt, Artificial Sequence
  Synthetic
ccguggggaacuugauucgg

SEQ ID NO: 5008 - RNA, 20 nt, Artificial Sequence
  Synthetic
cgaauggccauggggcgccg

SEQ ID NO: 5009 - RNA, 20 nt, Artificial Sequence
  Synthetic
cgccgaaucaaguuccccac

SEQ ID NO: 5010 - RNA, 20 nt, Artificial Sequence
  Synthetic
cggcgccccauggccauucg

SEQ ID NO: 5011 - RNA, 20 nt, Artificial Sequence
  Synthetic
cguggggaacuugauucggc

SEQ ID NO: 5012 - RNA, 20 nt, Artificial Sequence
  Synthetic
cuugauucggcgccccaugg

SEQ ID NO: 5013 - RNA, 20 nt, Artificial Sequence
  Synthetic
gaacuugauucggcgcccca

SEQ ID NO: 5014 - RNA, 20 nt, Artificial Sequence
  Synthetic
gaauggccauggggcgccga

SEQ ID NO: 5015 - RNA, 20 nt, Artificial Sequence
  Synthetic
gauucggcgccccauggcca

SEQ ID NO: 5016 - RNA, 20 nt, Artificial Sequence
  Synthetic
gccauggggcgccgaaucaa

SEQ ID NO: 5017 - RNA, 20 nt, Artificial Sequence
  Synthetic
gcgccccauggccauucgga

SEQ ID NO: 5018 - RNA, 20 nt, Artificial Sequence
  Synthetic
gcgccgaaucaaguucccca

SEQ ID NO: 5019 - RNA, 20 nt, Artificial Sequence
  Synthetic
ggaacuugauucggcgcccc

SEQ ID NO: 5020 - RNA, 20 nt, Artificial Sequence
  Synthetic
ggccauggggcgccgaauca

SEQ ID NO: 5021 - RNA, 20 nt, Artificial Sequence
  Synthetic
ggcgccccauggccauucgg

SEQ ID NO: 5022 - RNA, 20 nt, Artificial Sequence
  Synthetic
ggcgccgaaucaaguucccc

SEQ ID NO: 5023 - RNA, 20 nt, Artificial Sequence
  Synthetic
gggaacuugauucggcgccc

SEQ ID NO: 5024 - RNA, 20 nt, Artificial Sequence
  Synthetic
gggcgccgaaucaaguuccc

SEQ ID NO: 5025 - RNA, 20 nt, Artificial Sequence
  Synthetic
ggggaacuugauucggcgcc

SEQ ID NO: 5026 - RNA, 20 nt, Artificial Sequence
  Synthetic
ggggcgccgaaucaaguucc

SEQ ID NO: 5027 - RNA, 20 nt, Artificial Sequence
  Synthetic
guggggaacuugauucggcg

SEQ ID NO: 5028 - RNA, 20 nt, Artificial Sequence
  Synthetic
uccauccgaauggccauggg

SEQ ID NO: 5029 - RNA, 20 nt, Artificial Sequence
  Synthetic
uccgaauggccauggggcgc

SEQ ID NO: 5030 - RNA, 20 nt, Artificial Sequence
  Synthetic
ucggcgccccauggccauuc

SEQ ID NO: 5031 - RNA, 20 nt, Artificial Sequence
  Synthetic
ugauucggcgccccauggcc

SEQ ID NO: 5032 - RNA, 20 nt, Artificial Sequence
  Synthetic
uggccauggggcgccgaauc

SEQ ID NO: 5033 - RNA, 20 nt, Artificial Sequence
  Synthetic
uggggaacuugauucggcgc

SEQ ID NO: 5034 - RNA, 20 nt, Artificial Sequence
  Synthetic
uggggcgccgaaucaaguuc

SEQ ID NO: 5035 - RNA, 20 nt, Artificial Sequence
  Synthetic
uucggcgccccauggccauu

SEQ ID NO: 5036 - RNA, 20 nt, Artificial Sequence
  Synthetic
uugauucggcgccccauggc

SEQ ID NO: 5037 - RNA, 21 nt, Artificial Sequence
  Synthetic
aacuugauucggcgccccaug

SEQ ID NO: 5038 - RNA, 21 nt, Artificial Sequence
  Synthetic
aauccauccgaauggccaugg

SEQ ID NO: 5039 - RNA, 21 nt, Artificial Sequence
  Synthetic
aauggccauggggcgccgaau

SEQ ID NO: 5040 - RNA, 21 nt, Artificial Sequence
  Synthetic
accguggggaacuugauucgg

SEQ ID NO: 5041 - RNA, 21 nt, Artificial Sequence
  Synthetic
acuugauucggcgccccaugg

SEQ ID NO: 5042 - RNA, 21 nt, Artificial Sequence
  Synthetic
auccauccgaauggccauggg

SEQ ID NO: 5043 - RNA, 21 nt, Artificial Sequence
  Synthetic
auccgaauggccauggggcgc

SEQ ID NO: 5044 - RNA, 21 nt, Artificial Sequence
  Synthetic
auggccauggggcgccgaauc

SEQ ID NO: 5045 - RNA, 21 nt, Artificial Sequence
  Synthetic
auggggcgccgaaucaaguuc

SEQ ID NO: 5046 - RNA, 21 nt, Artificial Sequence
  Synthetic
auucggcgccccauggccauu

SEQ ID NO: 5047 - RNA, 21 nt, Artificial Sequence
  Synthetic
caccguggggaacuugauucg

SEQ ID NO: 5048 - RNA, 21 nt, Artificial Sequence
  Synthetic
cauccgaauggccauggggcg

SEQ ID NO: 5049 - RNA, 21 nt, Artificial Sequence
  Synthetic
cauggggcgccgaaucaaguu

SEQ ID NO: 5050 - RNA, 21 nt, Artificial Sequence
  Synthetic
ccaccguggggaacuugauuc

SEQ ID NO: 5051 - RNA, 21 nt, Artificial Sequence
  Synthetic
ccauggggcgccgaaucaagu

SEQ ID NO: 5052 - RNA, 21 nt, Artificial Sequence
  Synthetic
ccgaauggccauggggcgccg

SEQ ID NO: 5053 - RNA, 21 nt, Artificial Sequence
  Synthetic
ccguggggaacuugauucggc

SEQ ID NO: 5054 - RNA, 21 nt, Artificial Sequence
  Synthetic
cgaauggccauggggcgccga

SEQ ID NO: 5055 - RNA, 21 nt, Artificial Sequence
  Synthetic
cgccgaaucaaguuccccacg

SEQ ID NO: 5056 - RNA, 21 nt, Artificial Sequence
  Synthetic
cggcgccccauggccauucgg

SEQ ID NO: 5057 - RNA, 21 nt, Artificial Sequence
  Synthetic
cguggggaacuugauucggcg

SEQ ID NO: 5058 - RNA, 21 nt, Artificial Sequence
  Synthetic
cuugauucggcgccccauggc

SEQ ID NO: 5059 - RNA, 21 nt, Artificial Sequence
  Synthetic
gaacuugauucggcgccccau

SEQ ID NO: 5060 - RNA, 21 nt, Artificial Sequence
  Synthetic
gaauggccauggggcgccgaa

SEQ ID NO: 5061 - RNA, 21 nt, Artificial Sequence
  Synthetic
gauucggcgccccauggccau

SEQ ID NO: 5062 - RNA, 21 nt, Artificial Sequence
  Synthetic
gccauggggcgccgaaucaag

SEQ ID NO: 5063 - RNA, 21 nt, Artificial Sequence
  Synthetic
gcgccccauggccauucggau

SEQ ID NO: 5064 - RNA, 21 nt, Artificial Sequence
  Synthetic
gcgccgaaucaaguuccccac

SEQ ID NO: 5065 - RNA, 21 nt, Artificial Sequence
  Synthetic
ggaacuugauucggcgcccca

SEQ ID NO: 5066 - RNA, 21 nt, Artificial Sequence
  Synthetic
ggccauggggcgccgaaucaa

SEQ ID NO: 5067 - RNA, 21 nt, Artificial Sequence
  Synthetic
ggcgccccauggccauucgga

SEQ ID NO: 5068 - RNA, 21 nt, Artificial Sequence
  Synthetic
ggcgccgaaucaaguucccca

SEQ ID NO: 5069 - RNA, 21 nt, Artificial Sequence
  Synthetic
gggaacuugauucggcgcccc

SEQ ID NO: 5070 - RNA, 21 nt, Artificial Sequence
  Synthetic
gggcgccgaaucaaguucccc

SEQ ID NO: 5071 - RNA, 21 nt, Artificial Sequence
  Synthetic
ggggaacuugauucggcgccc

SEQ ID NO: 5072 - RNA, 21 nt, Artificial Sequence
  Synthetic
ggggcgccgaaucaaguuccc

SEQ ID NO: 5073 - RNA, 21 nt, Artificial Sequence
  Synthetic
guggggaacuugauucggcgc

SEQ ID NO: 5074 - RNA, 21 nt, Artificial Sequence
  Synthetic
uccauccgaauggccaugggg

SEQ ID NO: 5075 - RNA, 21 nt, Artificial Sequence
  Synthetic
uccgaauggccauggggcgcc

SEQ ID NO: 5076 - RNA, 21 nt, Artificial Sequence
  Synthetic
ucggcgccccauggccauucg

SEQ ID NO: 5077 - RNA, 21 nt, Artificial Sequence
  Synthetic
ugauucggcgccccauggcca

SEQ ID NO: 5078 - RNA, 21 nt, Artificial Sequence
  Synthetic
uggccauggggcgccgaauca

SEQ ID NO: 5079 - RNA, 21 nt, Artificial Sequence
  Synthetic
uggggaacuugauucggcgcc

SEQ ID NO: 5080 - RNA, 21 nt, Artificial Sequence
  Synthetic
uggggcgccgaaucaaguucc

SEQ ID NO: 5081 - RNA, 21 nt, Artificial Sequence
  Synthetic
uucggcgccccauggccauuc

SEQ ID NO: 5082 - RNA, 21 nt, Artificial Sequence
  Synthetic
uugauucggcgccccauggcc

SEQ ID NO: 5083 - RNA, 22 nt, Artificial Sequence
  Synthetic
aacuugauucggcgccccaugg

SEQ ID NO: 5084 - RNA, 22 nt, Artificial Sequence
  Synthetic
aauccauccgaauggccauggg

SEQ ID NO: 5085 - RNA, 22 nt, Artificial Sequence
  Synthetic
aauggccauggggcgccgaauc

SEQ ID NO: 5086 - RNA, 22 nt, Artificial Sequence
  Synthetic
accaccguggggaacuugauuc

SEQ ID NO: 5087 - RNA, 22 nt, Artificial Sequence
  Synthetic
accguggggaacuugauucggc

SEQ ID NO: 5088 - RNA, 22 nt, Artificial Sequence
  Synthetic
acuugauucggcgccccauggc

SEQ ID NO: 5089 - RNA, 22 nt, Artificial Sequence
  Synthetic
auccauccgaauggccaugggg

SEQ ID NO: 5090 - RNA, 22 nt, Artificial Sequence
  Synthetic
auccgaauggccauggggcgcc

SEQ ID NO: 5091 - RNA, 22 nt, Artificial Sequence
  Synthetic
auggccauggggcgccgaauca

SEQ ID NO: 5092 - RNA, 22 nt, Artificial Sequence
  Synthetic
auggggcgccgaaucaaguucc

SEQ ID NO: 5093 - RNA, 22 nt, Artificial Sequence
  Synthetic
auucggcgccccauggccauuc

SEQ ID NO: 5094 - RNA, 22 nt, Artificial Sequence
  Synthetic
caccguggggaacuugauucgg

SEQ ID NO: 5095 - RNA, 22 nt, Artificial Sequence
  Synthetic
cauccgaauggccauggggcgc

SEQ ID NO: 5096 - RNA, 22 nt, Artificial Sequence
  Synthetic
cauggggcgccgaaucaaguuc

SEQ ID NO: 5097 - RNA, 22 nt, Artificial Sequence
  Synthetic
ccaccguggggaacuugauucg

SEQ ID NO: 5098 - RNA, 22 nt, Artificial Sequence
  Synthetic
ccauccgaauggccauggggcg

SEQ ID NO: 5099 - RNA, 22 nt, Artificial Sequence
  Synthetic
ccauggggcgccgaaucaaguu

SEQ ID NO: 5100 - RNA, 22 nt, Artificial Sequence
  Synthetic
ccgaauggccauggggcgccga

SEQ ID NO: 5101 - RNA, 22 nt, Artificial Sequence
  Synthetic
ccguggggaacuugauucggcg

SEQ ID NO: 5102 - RNA, 22 nt, Artificial Sequence
  Synthetic
cgaauggccauggggcgccgaa

SEQ ID NO: 5103 - RNA, 22 nt, Artificial Sequence
  Synthetic
cgccgaaucaaguuccccacgg

SEQ ID NO: 5104 - RNA, 22 nt, Artificial Sequence
  Synthetic
cggcgccccauggccauucgga

SEQ ID NO: 5105 - RNA, 22 nt, Artificial Sequence
  Synthetic
cguggggaacuugauucggcgc

SEQ ID NO: 5106 - RNA, 22 nt, Artificial Sequence
  Synthetic
cuugauucggcgccccauggcc

SEQ ID NO: 5107 - RNA, 22 nt, Artificial Sequence
  Synthetic
gaacuugauucggcgccccaug

SEQ ID NO: 5108 - RNA, 22 nt, Artificial Sequence
  Synthetic
gaauccauccgaauggccaugg

SEQ ID NO: 5109 - RNA, 22 nt, Artificial Sequence
  Synthetic
gaauggccauggggcgccgaau

SEQ ID NO: 5110 - RNA, 22 nt, Artificial Sequence
  Synthetic
gauucggcgccccauggccauu

SEQ ID NO: 5111 - RNA, 22 nt, Artificial Sequence
  Synthetic
gccauggggcgccgaaucaagu

SEQ ID NO: 5112 - RNA, 22 nt, Artificial Sequence
  Synthetic
gcgccccauggccauucggaug

SEQ ID NO: 5113 - RNA, 22 nt, Artificial Sequence
  Synthetic
gcgccgaaucaaguuccccacg

SEQ ID NO: 5114 - RNA, 22 nt, Artificial Sequence
  Synthetic
ggaacuugauucggcgccccau

SEQ ID NO: 5115 - RNA, 22 nt, Artificial Sequence
  Synthetic
ggccauggggcgccgaaucaag

SEQ ID NO: 5116 - RNA, 22 nt, Artificial Sequence
  Synthetic
ggcgccccauggccauucggau

SEQ ID NO: 5117 - RNA, 22 nt, Artificial Sequence
  Synthetic
ggcgccgaaucaaguuccccac

SEQ ID NO: 5118 - RNA, 22 nt, Artificial Sequence
  Synthetic
gggaacuugauucggcgcccca

SEQ ID NO: 5119 - RNA, 22 nt, Artificial Sequence
  Synthetic
gggcgccgaaucaaguucccca

SEQ ID NO: 5120 - RNA, 22 nt, Artificial Sequence
  Synthetic
ggggaacuugauucggcgcccc

SEQ ID NO: 5121 - RNA, 22 nt, Artificial Sequence
  Synthetic
ggggcgccgaaucaaguucccc

SEQ ID NO: 5122 - RNA, 22 nt, Artificial Sequence
  Synthetic
guggggaacuugauucggcgcc

SEQ ID NO: 5123 - RNA, 22 nt, Artificial Sequence
  Synthetic
uccgaauggccauggggcgccg

SEQ ID NO: 5124 - RNA, 22 nt, Artificial Sequence
  Synthetic
ucggcgccccauggccauucgg

SEQ ID NO: 5125 - RNA, 22 nt, Artificial Sequence
  Synthetic
ugauucggcgccccauggccau

SEQ ID NO: 5126 - RNA, 22 nt, Artificial Sequence
  Synthetic
uggccauggggcgccgaaucaa

SEQ ID NO: 5127 - RNA, 22 nt, Artificial Sequence
  Synthetic
uggggaacuugauucggcgccc

SEQ ID NO: 5128 - RNA, 22 nt, Artificial Sequence
  Synthetic
uggggcgccgaaucaaguuccc

SEQ ID NO: 5129 - RNA, 22 nt, Artificial Sequence
  Synthetic
uucggcgccccauggccauucg

SEQ ID NO: 5130 - RNA, 22 nt, Artificial Sequence
  Synthetic
uugauucggcgccccauggcca

SEQ ID NO: 5131 - RNA, 20 nt, Artificial Sequence
  Synthetic
aacuugauucggagcccuau

SEQ ID NO: 5132 - RNA, 20 nt, Artificial Sequence
  Synthetic
aauccauccgaauggccaua

SEQ ID NO: 5133 - RNA, 20 nt, Artificial Sequence
  Synthetic
aauggccauagggcuccgaa

SEQ ID NO: 5134 - RNA, 20 nt, Artificial Sequence
  Synthetic
acuugauucggagcccuaug

SEQ ID NO: 5135 - RNA, 20 nt, Artificial Sequence
  Synthetic
agaauccauccgaauggcca

SEQ ID NO: 5136 - RNA, 20 nt, Artificial Sequence
  Synthetic
agcccuauggccauucggau

SEQ ID NO: 5137 - RNA, 20 nt, Artificial Sequence
  Synthetic
auagggcuccgaaucaaguu

SEQ ID NO: 5138 - RNA, 20 nt, Artificial Sequence
  Synthetic
auccauccgaauggccauag

SEQ ID NO: 5139 - RNA, 20 nt, Artificial Sequence
  Synthetic
auccgaauggccauagggcu

SEQ ID NO: 5140 - RNA, 20 nt, Artificial Sequence
  Synthetic
auggccauagggcuccgaau

SEQ ID NO: 5141 - RNA, 20 nt, Artificial Sequence
  Synthetic
auucggagcccuauggccau

SEQ ID NO: 5142 - RNA, 20 nt, Artificial Sequence
  Synthetic
cagaauccauccgaauggcc

SEQ ID NO: 5143 - RNA, 20 nt, Artificial Sequence
  Synthetic
cauagggcuccgaaucaagu

SEQ ID NO: 5144 - RNA, 20 nt, Artificial Sequence
  Synthetic
cauccgaauggccauagggc

SEQ ID NO: 5145 - RNA, 20 nt, Artificial Sequence
  Synthetic
ccauagggcuccgaaucaag

SEQ ID NO: 5146 - RNA, 20 nt, Artificial Sequence
  Synthetic
ccauccgaauggccauaggg

SEQ ID NO: 5147 - RNA, 20 nt, Artificial Sequence
  Synthetic
cccuauggccauucggaugg

SEQ ID NO: 5148 - RNA, 20 nt, Artificial Sequence
  Synthetic
ccgaauggccauagggcucc

SEQ ID NO: 5149 - RNA, 20 nt, Artificial Sequence
  Synthetic
ccuauggccauucggaugga

SEQ ID NO: 5150 - RNA, 20 nt, Artificial Sequence
  Synthetic
cgaauggccauagggcuccg

SEQ ID NO: 5151 - RNA, 20 nt, Artificial Sequence
  Synthetic
cggagcccuauggccauucg

SEQ ID NO: 5152 - RNA, 20 nt, Artificial Sequence
  Synthetic
cuauggccauucggauggau

SEQ ID NO: 5153 - RNA, 20 nt, Artificial Sequence
  Synthetic
cuugauucggagcccuaugg

SEQ ID NO: 5154 - RNA, 20 nt, Artificial Sequence
  Synthetic
gaacuugauucggagcccua

SEQ ID NO: 5155 - RNA, 20 nt, Artificial Sequence
  Synthetic
gaauccauccgaauggccau

SEQ ID NO: 5156 - RNA, 20 nt, Artificial Sequence
  Synthetic
gaauggccauagggcuccga

SEQ ID NO: 5157 - RNA, 20 nt, Artificial Sequence
  Synthetic
gagcccuauggccauucgga

SEQ ID NO: 5158 - RNA, 20 nt, Artificial Sequence
  Synthetic
gauucggagcccuauggcca

SEQ ID NO: 5159 - RNA, 20 nt, Artificial Sequence
  Synthetic
gcagaauccauccgaauggc

SEQ ID NO: 5160 - RNA, 20 nt, Artificial Sequence
  Synthetic
gccauagggcuccgaaucaa

SEQ ID NO: 5161 - RNA, 20 nt, Artificial Sequence
  Synthetic
gcccuauggccauucggaug

SEQ ID NO: 5162 - RNA, 20 nt, Artificial Sequence
  Synthetic
ggaacuugauucggagcccu

SEQ ID NO: 5163 - RNA, 20 nt, Artificial Sequence
  Synthetic
ggagcccuauggccauucgg

SEQ ID NO: 5164 - RNA, 20 nt, Artificial Sequence
  Synthetic
ggccauagggcuccgaauca

SEQ ID NO: 5165 - RNA, 20 nt, Artificial Sequence
  Synthetic
gggaacuugauucggagccc

SEQ ID NO: 5166 - RNA, 20 nt, Artificial Sequence
  Synthetic
ggggaacuugauucggagcc

SEQ ID NO: 5167 - RNA, 20 nt, Artificial Sequence
  Synthetic
guggggaacuugauucggag

SEQ ID NO: 5168 - RNA, 20 nt, Artificial Sequence
  Synthetic
uagggcuccgaaucaaguuc

SEQ ID NO: 5169 - RNA, 20 nt, Artificial Sequence
  Synthetic
uccauccgaauggccauagg

SEQ ID NO: 5170 - RNA, 20 nt, Artificial Sequence
  Synthetic
uccgaauggccauagggcuc

SEQ ID NO: 5171 - RNA, 20 nt, Artificial Sequence
  Synthetic
ucggagcccuauggccauuc

SEQ ID NO: 5172 - RNA, 20 nt, Artificial Sequence
  Synthetic
ugauucggagcccuauggcc

SEQ ID NO: 5173 - RNA, 20 nt, Artificial Sequence
  Synthetic
uggccauagggcuccgaauc

SEQ ID NO: 5174 - RNA, 20 nt, Artificial Sequence
  Synthetic
uggggaacuugauucggagc

SEQ ID NO: 5175 - RNA, 20 nt, Artificial Sequence
  Synthetic
uucggagcccuauggccauu

SEQ ID NO: 5176 - RNA, 20 nt, Artificial Sequence
  Synthetic
uugauucggagcccuauggc

SEQ ID NO: 5177 - RNA, 21 nt, Artificial Sequence
  Synthetic
aacuugauucggagcccuaug

SEQ ID NO: 5178 - RNA, 21 nt, Artificial Sequence
  Synthetic
aauccauccgaauggccauag

SEQ ID NO: 5179 - RNA, 21 nt, Artificial Sequence
  Synthetic
aauggccauagggcuccgaau

SEQ ID NO: 5180 - RNA, 21 nt, Artificial Sequence
  Synthetic
acuugauucggagcccuaugg

SEQ ID NO: 5181 - RNA, 21 nt, Artificial Sequence
  Synthetic
agaauccauccgaauggccau

SEQ ID NO: 5182 - RNA, 21 nt, Artificial Sequence
  Synthetic
agcccuauggccauucggaug

SEQ ID NO: 5183 - RNA, 21 nt, Artificial Sequence
  Synthetic
auagggcuccgaaucaaguuc

SEQ ID NO: 5184 - RNA, 21 nt, Artificial Sequence
  Synthetic
auccauccgaauggccauagg

SEQ ID NO: 5185 - RNA, 21 nt, Artificial Sequence
  Synthetic
auccgaauggccauagggcuc

SEQ ID NO: 5186 - RNA, 21 nt, Artificial Sequence
  Synthetic
auggccauagggcuccgaauc

SEQ ID NO: 5187 - RNA, 21 nt, Artificial Sequence
  Synthetic
auucggagcccuauggccauu

SEQ ID NO: 5188 - RNA, 21 nt, Artificial Sequence
  Synthetic
cagaauccauccgaauggcca

SEQ ID NO: 5189 - RNA, 21 nt, Artificial Sequence
  Synthetic
cauagggcuccgaaucaaguu

SEQ ID NO: 5190 - RNA, 21 nt, Artificial Sequence
  Synthetic
cauccgaauggccauagggcu

SEQ ID NO: 5191 - RNA, 21 nt, Artificial Sequence
  Synthetic
ccauagggcuccgaaucaagu

SEQ ID NO: 5192 - RNA, 21 nt, Artificial Sequence
  Synthetic
ccauccgaauggccauagggc

SEQ ID NO: 5193 - RNA, 21 nt, Artificial Sequence
  Synthetic
cccuauggccauucggaugga

SEQ ID NO: 5194 - RNA, 21 nt, Artificial Sequence
  Synthetic
ccgaauggccauagggcuccg

SEQ ID NO: 5195 - RNA, 21 nt, Artificial Sequence
  Synthetic
ccuauggccauucggauggau

SEQ ID NO: 5196 - RNA, 21 nt, Artificial Sequence
  Synthetic
cgaauggccauagggcuccga

SEQ ID NO: 5197 - RNA, 21 nt, Artificial Sequence
  Synthetic
cgcagaauccauccgaauggc

SEQ ID NO: 5198 - RNA, 21 nt, Artificial Sequence
  Synthetic
cggagcccuauggccauucgg

SEQ ID NO: 5199 - RNA, 21 nt, Artificial Sequence
  Synthetic
cguggggaacuugauucggag

SEQ ID NO: 5200 - RNA, 21 nt, Artificial Sequence
  Synthetic
cuauggccauucggauggauu

SEQ ID NO: 5201 - RNA, 21 nt, Artificial Sequence
  Synthetic
cuugauucggagcccuauggc

SEQ ID NO: 5202 - RNA, 21 nt, Artificial Sequence
  Synthetic
gaacuugauucggagcccuau

SEQ ID NO: 5203 - RNA, 21 nt, Artificial Sequence
  Synthetic
gaauccauccgaauggccaua

SEQ ID NO: 5204 - RNA, 21 nt, Artificial Sequence
  Synthetic
gaauggccauagggcuccgaa

SEQ ID NO: 5205 - RNA, 21 nt, Artificial Sequence
  Synthetic
gagcccuauggccauucggau

SEQ ID NO: 5206 - RNA, 21 nt, Artificial Sequence
  Synthetic
gauucggagcccuauggccau

SEQ ID NO: 5207 - RNA, 21 nt, Artificial Sequence
  Synthetic
gcagaauccauccgaauggcc

SEQ ID NO: 5208 - RNA, 21 nt, Artificial Sequence
  Synthetic
gccauagggcuccgaaucaag

SEQ ID NO: 5209 - RNA, 21 nt, Artificial Sequence
  Synthetic
gcccuauggccauucggaugg

SEQ ID NO: 5210 - RNA, 21 nt, Artificial Sequence
  Synthetic
ggaacuugauucggagcccua

SEQ ID NO: 5211 - RNA, 21 nt, Artificial Sequence
  Synthetic
ggagcccuauggccauucgga

SEQ ID NO: 5212 - RNA, 21 nt, Artificial Sequence
  Synthetic
ggccauagggcuccgaaucaa

SEQ ID NO: 5213 - RNA, 21 nt, Artificial Sequence
  Synthetic
gggaacuugauucggagcccu

SEQ ID NO: 5214 - RNA, 21 nt, Artificial Sequence
  Synthetic
ggggaacuugauucggagccc

SEQ ID NO: 5215 - RNA, 21 nt, Artificial Sequence
  Synthetic
guggggaacuugauucggagc

SEQ ID NO: 5216 - RNA, 21 nt, Artificial Sequence
  Synthetic
uagggcuccgaaucaaguucc

SEQ ID NO: 5217 - RNA, 21 nt, Artificial Sequence
  Synthetic
uccauccgaauggccauaggg

SEQ ID NO: 5218 - RNA, 21 nt, Artificial Sequence
  Synthetic
uccgaauggccauagggcucc

SEQ ID NO: 5219 - RNA, 21 nt, Artificial Sequence
  Synthetic
ucggagcccuauggccauucg

SEQ ID NO: 5220 - RNA, 21 nt, Artificial Sequence
  Synthetic
ugauucggagcccuauggcca

SEQ ID NO: 5221 - RNA, 21 nt, Artificial Sequence
  Synthetic
uggccauagggcuccgaauca

SEQ ID NO: 5222 - RNA, 21 nt, Artificial Sequence
  Synthetic
uggggaacuugauucggagcc

SEQ ID NO: 5223 - RNA, 21 nt, Artificial Sequence
  Synthetic
uucggagcccuauggccauuc

SEQ ID NO: 5224 - RNA, 21 nt, Artificial Sequence
  Synthetic
uugauucggagcccuauggcc

SEQ ID NO: 5225 - RNA, 22 nt, Artificial Sequence
  Synthetic
aacuugauucggagcccuaugg

SEQ ID NO: 5226 - RNA, 22 nt, Artificial Sequence
  Synthetic
aauccauccgaauggccauagg

SEQ ID NO: 5227 - RNA, 22 nt, Artificial Sequence
  Synthetic
aauggccauagggcuccgaauc

SEQ ID NO: 5228 - RNA, 22 nt, Artificial Sequence
  Synthetic
acuugauucggagcccuauggc

SEQ ID NO: 5229 - RNA, 22 nt, Artificial Sequence
  Synthetic
agaauccauccgaauggccaua

SEQ ID NO: 5230 - RNA, 22 nt, Artificial Sequence
  Synthetic
agcccuauggccauucggaugg

SEQ ID NO: 5231 - RNA, 22 nt, Artificial Sequence
  Synthetic
auagggcuccgaaucaaguucc

SEQ ID NO: 5232 - RNA, 22 nt, Artificial Sequence
  Synthetic
auccauccgaauggccauaggg

SEQ ID NO: 5233 - RNA, 22 nt, Artificial Sequence
  Synthetic
auccgaauggccauagggcucc

SEQ ID NO: 5234 - RNA, 22 nt, Artificial Sequence
  Synthetic
auggccauagggcuccgaauca

SEQ ID NO: 5235 - RNA, 22 nt, Artificial Sequence
  Synthetic
auucggagcccuauggccauuc

SEQ ID NO: 5236 - RNA, 22 nt, Artificial Sequence
  Synthetic
cagaauccauccgaauggccau

SEQ ID NO: 5237 - RNA, 22 nt, Artificial Sequence
  Synthetic
cauagggcuccgaaucaaguuc

SEQ ID NO: 5238 - RNA, 22 nt, Artificial Sequence
  Synthetic
cauccgaauggccauagggcuc

SEQ ID NO: 5239 - RNA, 22 nt, Artificial Sequence
  Synthetic
ccauagggcuccgaaucaaguu

SEQ ID NO: 5240 - RNA, 22 nt, Artificial Sequence
  Synthetic
ccauccgaauggccauagggcu

SEQ ID NO: 5241 - RNA, 22 nt, Artificial Sequence
  Synthetic
cccuauggccauucggauggau

SEQ ID NO: 5242 - RNA, 22 nt, Artificial Sequence
  Synthetic
ccgaauggccauagggcuccga

SEQ ID NO: 5243 - RNA, 22 nt, Artificial Sequence
  Synthetic
ccguggggaacuugauucggag

SEQ ID NO: 5244 - RNA, 22 nt, Artificial Sequence
  Synthetic
ccuauggccauucggauggauu

SEQ ID NO: 5245 - RNA, 22 nt, Artificial Sequence
  Synthetic
cgaauggccauagggcuccgaa

SEQ ID NO: 5246 - RNA, 22 nt, Artificial Sequence
  Synthetic
cgcagaauccauccgaauggcc

SEQ ID NO: 5247 - RNA, 22 nt, Artificial Sequence
  Synthetic
cggagcccuauggccauucgga

SEQ ID NO: 5248 - RNA, 22 nt, Artificial Sequence
  Synthetic
cguggggaacuugauucggagc

SEQ ID NO: 5249 - RNA, 22 nt, Artificial Sequence
  Synthetic
cuauggccauucggauggauuc

SEQ ID NO: 5250 - RNA, 22 nt, Artificial Sequence
  Synthetic
cuugauucggagcccuauggcc

SEQ ID NO: 5251 - RNA, 22 nt, Artificial Sequence
  Synthetic
gaacuugauucggagcccuaug

SEQ ID NO: 5252 - RNA, 22 nt, Artificial Sequence
  Synthetic
gaauccauccgaauggccauag

SEQ ID NO: 5253 - RNA, 22 nt, Artificial Sequence
  Synthetic
gaauggccauagggcuccgaau

SEQ ID NO: 5254 - RNA, 22 nt, Artificial Sequence
  Synthetic
gagcccuauggccauucggaug

SEQ ID NO: 5255 - RNA, 22 nt, Artificial Sequence
  Synthetic
gauucggagcccuauggccauu

SEQ ID NO: 5256 - RNA, 22 nt, Artificial Sequence
  Synthetic
gcagaauccauccgaauggcca

SEQ ID NO: 5257 - RNA, 22 nt, Artificial Sequence
  Synthetic
gccauagggcuccgaaucaagu

SEQ ID NO: 5258 - RNA, 22 nt, Artificial Sequence
  Synthetic
gcccuauggccauucggaugga

SEQ ID NO: 5259 - RNA, 22 nt, Artificial Sequence
  Synthetic
ggaacuugauucggagcccuau

SEQ ID NO: 5260 - RNA, 22 nt, Artificial Sequence
  Synthetic
ggagcccuauggccauucggau

SEQ ID NO: 5261 - RNA, 22 nt, Artificial Sequence
  Synthetic
ggccauagggcuccgaaucaag

SEQ ID NO: 5262 - RNA, 22 nt, Artificial Sequence
  Synthetic
gggaacuugauucggagcccua

SEQ ID NO: 5263 - RNA, 22 nt, Artificial Sequence
  Synthetic
ggggaacuugauucggagcccu

SEQ ID NO: 5264 - RNA, 22 nt, Artificial Sequence
  Synthetic
guggggaacuugauucggagcc

SEQ ID NO: 5265 - RNA, 22 nt, Artificial Sequence
  Synthetic
uagggcuccgaaucaaguuccc

SEQ ID NO: 5266 - RNA, 22 nt, Artificial Sequence
  Synthetic
uccauccgaauggccauagggc

SEQ ID NO: 5267 - RNA, 22 nt, Artificial Sequence
  Synthetic
uccgaauggccauagggcuccg

SEQ ID NO: 5268 - RNA, 22 nt, Artificial Sequence
  Synthetic
ucgcagaauccauccgaauggc

SEQ ID NO: 5269 - RNA, 22 nt, Artificial Sequence
  Synthetic
ucggagcccuauggccauucgg

SEQ ID NO: 5270 - RNA, 22 nt, Artificial Sequence
  Synthetic
ugauucggagcccuauggccau

SEQ ID NO: 5271 - RNA, 22 nt, Artificial Sequence
  Synthetic
uggccauagggcuccgaaucaa

SEQ ID NO: 5272 - RNA, 22 nt, Artificial Sequence
  Synthetic
uggggaacuugauucggagccc

SEQ ID NO: 5273 - RNA, 22 nt, Artificial Sequence
  Synthetic
uucggagcccuauggccauucg

SEQ ID NO: 5274 - RNA, 22 nt, Artificial Sequence
  Synthetic
uugauucggagcccuauggcca

SEQ ID NO: 5275 - RNA, 20 nt, Artificial Sequence
  Synthetic
aauccaucugaauggccaug

SEQ ID NO: 5276 - RNA, 20 nt, Artificial Sequence
  Synthetic
agaauccaucugaauggcca

SEQ ID NO: 5277 - RNA, 20 nt, Artificial Sequence
  Synthetic
agccccauggccauucagau

SEQ ID NO: 5278 - RNA, 20 nt, Artificial Sequence
  Synthetic
auccaucugaauggccaugg

SEQ ID NO: 5279 - RNA, 20 nt, Artificial Sequence
  Synthetic
aucgcagaauccaucugaau

SEQ ID NO: 5280 - RNA, 20 nt, Artificial Sequence
  Synthetic
aucugaauggccauggggcu

SEQ ID NO: 5281 - RNA, 20 nt, Artificial Sequence
  Synthetic
auggccauucagauggauuc

SEQ ID NO: 5282 - RNA, 20 nt, Artificial Sequence
  Synthetic
auucagauggauucugcgau

SEQ ID NO: 5283 - RNA, 20 nt, Artificial Sequence
  Synthetic
auucggagccccauggccau

SEQ ID NO: 5284 - RNA, 20 nt, Artificial Sequence
  Synthetic
cagaauccaucugaauggcc

SEQ ID NO: 5285 - RNA, 20 nt, Artificial Sequence
  Synthetic
cagauggauucugcgaugac

SEQ ID NO: 5286 - RNA, 20 nt, Artificial Sequence
  Synthetic
caucgcagaauccaucugaa

SEQ ID NO: 5287 - RNA, 20 nt, Artificial Sequence
  Synthetic
caucugaauggccauggggc

SEQ ID NO: 5288 - RNA, 20 nt, Artificial Sequence
  Synthetic
cauggccauucagauggauu

SEQ ID NO: 5289 - RNA, 20 nt, Artificial Sequence
  Synthetic
cauucagauggauucugcga

SEQ ID NO: 5290 - RNA, 20 nt, Artificial Sequence
  Synthetic
ccaucugaauggccaugggg

SEQ ID NO: 5291 - RNA, 20 nt, Artificial Sequence
  Synthetic
ccauggccauucagauggau

SEQ ID NO: 5292 - RNA, 20 nt, Artificial Sequence
  Synthetic
ccauucagauggauucugcg

SEQ ID NO: 5293 - RNA, 20 nt, Artificial Sequence
  Synthetic
cccauggccauucagaugga

SEQ ID NO: 5294 - RNA, 20 nt, Artificial Sequence
  Synthetic
ccccauggccauucagaugg

SEQ ID NO: 5295 - RNA, 20 nt, Artificial Sequence
  Synthetic
cgcagaauccaucugaaugg

SEQ ID NO: 5296 - RNA, 20 nt, Artificial Sequence
  Synthetic
cggagccccauggccauuca

SEQ ID NO: 5297 - RNA, 20 nt, Artificial Sequence
  Synthetic
cugaauggccauggggcucc

SEQ ID NO: 5298 - RNA, 20 nt, Artificial Sequence
  Synthetic
cugucaucgcagaauccauc

SEQ ID NO: 5299 - RNA, 20 nt, Artificial Sequence
  Synthetic
gaauccaucugaauggccau

SEQ ID NO: 5300 - RNA, 20 nt, Artificial Sequence
  Synthetic
gagccccauggccauucaga

SEQ ID NO: 5301 - RNA, 20 nt, Artificial Sequence
  Synthetic
gauucggagccccauggcca

SEQ ID NO: 5302 - RNA, 20 nt, Artificial Sequence
  Synthetic
gcagaauccaucugaauggc

SEQ ID NO: 5303 - RNA, 20 nt, Artificial Sequence
  Synthetic
gccauucagauggauucugc

SEQ ID NO: 5304 - RNA, 20 nt, Artificial Sequence
  Synthetic
gccccauggccauucagaug

SEQ ID NO: 5305 - RNA, 20 nt, Artificial Sequence
  Synthetic
gcugucaucgcagaauccau

SEQ ID NO: 5306 - RNA, 20 nt, Artificial Sequence
  Synthetic
ggagccccauggccauucag

SEQ ID NO: 5307 - RNA, 20 nt, Artificial Sequence
  Synthetic
ggccauucagauggauucug

SEQ ID NO: 5308 - RNA, 20 nt, Artificial Sequence
  Synthetic
ggcugucaucgcagaaucca

SEQ ID NO: 5309 - RNA, 20 nt, Artificial Sequence
  Synthetic
gucaucgcagaauccaucug

SEQ ID NO: 5310 - RNA, 20 nt, Artificial Sequence
  Synthetic
ucagauggauucugcgauga

SEQ ID NO: 5311 - RNA, 20 nt, Artificial Sequence
  Synthetic
ucaucgcagaauccaucuga

SEQ ID NO: 5312 - RNA, 20 nt, Artificial Sequence
  Synthetic
uccaucugaauggccauggg

SEQ ID NO: 5313 - RNA, 20 nt, Artificial Sequence
  Synthetic
ucgcagaauccaucugaaug

SEQ ID NO: 5314 - RNA, 20 nt, Artificial Sequence
  Synthetic
ucggagccccauggccauuc

SEQ ID NO: 5315 - RNA, 20 nt, Artificial Sequence
  Synthetic
ucugaauggccauggggcuc

SEQ ID NO: 5316 - RNA, 20 nt, Artificial Sequence
  Synthetic
uggccauucagauggauucu

SEQ ID NO: 5317 - RNA, 20 nt, Artificial Sequence
  Synthetic
uggcugucaucgcagaaucc

SEQ ID NO: 5318 - RNA, 20 nt, Artificial Sequence
  Synthetic
ugucaucgcagaauccaucu

SEQ ID NO: 5319 - RNA, 20 nt, Artificial Sequence
  Synthetic
uucagauggauucugcgaug

SEQ ID NO: 5320 - RNA, 20 nt, Artificial Sequence
  Synthetic
uucggagccccauggccauu

SEQ ID NO: 5321 - RNA, 21 nt, Artificial Sequence
  Synthetic
aauccaucugaauggccaugg

SEQ ID NO: 5322 - RNA, 21 nt, Artificial Sequence
  Synthetic
agaauccaucugaauggccau

SEQ ID NO: 5323 - RNA, 21 nt, Artificial Sequence
  Synthetic
agccccauggccauucagaug

SEQ ID NO: 5324 - RNA, 21 nt, Artificial Sequence
  Synthetic
auccaucugaauggccauggg

SEQ ID NO: 5325 - RNA, 21 nt, Artificial Sequence
  Synthetic
aucgcagaauccaucugaaug

SEQ ID NO: 5326 - RNA, 21 nt, Artificial Sequence
  Synthetic
aucugaauggccauggggcuc

SEQ ID NO: 5327 - RNA, 21 nt, Artificial Sequence
  Synthetic
auggccauucagauggauucu

SEQ ID NO: 5328 - RNA, 21 nt, Artificial Sequence
  Synthetic
auucagauggauucugcgaug

SEQ ID NO: 5329 - RNA, 21 nt, Artificial Sequence
  Synthetic
auucggagccccauggccauu

SEQ ID NO: 5330 - RNA, 21 nt, Artificial Sequence
  Synthetic
cagaauccaucugaauggcca

SEQ ID NO: 5331 - RNA, 21 nt, Artificial Sequence
  Synthetic
cagauggauucugcgaugaca

SEQ ID NO: 5332 - RNA, 21 nt, Artificial Sequence
  Synthetic
caucgcagaauccaucugaau

SEQ ID NO: 5333 - RNA, 21 nt, Artificial Sequence
  Synthetic
caucugaauggccauggggcu

SEQ ID NO: 5334 - RNA, 21 nt, Artificial Sequence
  Synthetic
cauggccauucagauggauuc

SEQ ID NO: 5335 - RNA, 21 nt, Artificial Sequence
  Synthetic
cauucagauggauucugcgau

SEQ ID NO: 5336 - RNA, 21 nt, Artificial Sequence
  Synthetic
ccaucugaauggccauggggc

SEQ ID NO: 5337 - RNA, 21 nt, Artificial Sequence
  Synthetic
ccauggccauucagauggauu

SEQ ID NO: 5338 - RNA, 21 nt, Artificial Sequence
  Synthetic
ccauucagauggauucugcga

SEQ ID NO: 5339 - RNA, 21 nt, Artificial Sequence
  Synthetic
cccauggccauucagauggau

SEQ ID NO: 5340 - RNA, 21 nt, Artificial Sequence
  Synthetic
ccccauggccauucagaugga

SEQ ID NO: 5341 - RNA, 21 nt, Artificial Sequence
  Synthetic
cgcagaauccaucugaauggc

SEQ ID NO: 5342 - RNA, 21 nt, Artificial Sequence
  Synthetic
cggagccccauggccauucag

SEQ ID NO: 5343 - RNA, 21 nt, Artificial Sequence
  Synthetic
cugaauggccauggggcuccg

SEQ ID NO: 5344 - RNA, 21 nt, Artificial Sequence
  Synthetic
cugucaucgcagaauccaucu

SEQ ID NO: 5345 - RNA, 21 nt, Artificial Sequence
  Synthetic
gaauccaucugaauggccaug

SEQ ID NO: 5346 - RNA, 21 nt, Artificial Sequence
  Synthetic
gagccccauggccauucagau

SEQ ID NO: 5347 - RNA, 21 nt, Artificial Sequence
  Synthetic
gauucggagccccauggccau

SEQ ID NO: 5348 - RNA, 21 nt, Artificial Sequence
  Synthetic
gcagaauccaucugaauggcc

SEQ ID NO: 5349 - RNA, 21 nt, Artificial Sequence
  Synthetic
gccauucagauggauucugcg

SEQ ID NO: 5350 - RNA, 21 nt, Artificial Sequence
  Synthetic
gccccauggccauucagaugg

SEQ ID NO: 5351 - RNA, 21 nt, Artificial Sequence
  Synthetic
gcugucaucgcagaauccauc

SEQ ID NO: 5352 - RNA, 21 nt, Artificial Sequence
  Synthetic
ggagccccauggccauucaga

SEQ ID NO: 5353 - RNA, 21 nt, Artificial Sequence
  Synthetic
ggccauucagauggauucugc

SEQ ID NO: 5354 - RNA, 21 nt, Artificial Sequence
  Synthetic
ggcugucaucgcagaauccau

SEQ ID NO: 5355 - RNA, 21 nt, Artificial Sequence
  Synthetic
gucaucgcagaauccaucuga

SEQ ID NO: 5356 - RNA, 21 nt, Artificial Sequence
  Synthetic
guggcugucaucgcagaaucc

SEQ ID NO: 5357 - RNA, 21 nt, Artificial Sequence
  Synthetic
ucagauggauucugcgaugac

SEQ ID NO: 5358 - RNA, 21 nt, Artificial Sequence
  Synthetic
ucaucgcagaauccaucugaa

SEQ ID NO: 5359 - RNA, 21 nt, Artificial Sequence
  Synthetic
uccaucugaauggccaugggg

SEQ ID NO: 5360 - RNA, 21 nt, Artificial Sequence
  Synthetic
ucgcagaauccaucugaaugg

SEQ ID NO: 5361 - RNA, 21 nt, Artificial Sequence
  Synthetic
ucggagccccauggccauuca

SEQ ID NO: 5362 - RNA, 21 nt, Artificial Sequence
  Synthetic
ucugaauggccauggggcucc

SEQ ID NO: 5363 - RNA, 21 nt, Artificial Sequence
  Synthetic
ugauucggagccccauggcca

SEQ ID NO: 5364 - RNA, 21 nt, Artificial Sequence
  Synthetic
uggccauucagauggauucug

SEQ ID NO: 5365 - RNA, 21 nt, Artificial Sequence
  Synthetic
uggcugucaucgcagaaucca

SEQ ID NO: 5366 - RNA, 21 nt, Artificial Sequence
  Synthetic
ugucaucgcagaauccaucug

SEQ ID NO: 5367 - RNA, 21 nt, Artificial Sequence
  Synthetic
uucagauggauucugcgauga

SEQ ID NO: 5368 - RNA, 21 nt, Artificial Sequence
  Synthetic
uucggagccccauggccauuc

SEQ ID NO: 5369 - RNA, 22 nt, Artificial Sequence
  Synthetic
aauccaucugaauggccauggg

SEQ ID NO: 5370 - RNA, 22 nt, Artificial Sequence
  Synthetic
agaauccaucugaauggccaug

SEQ ID NO: 5371 - RNA, 22 nt, Artificial Sequence
  Synthetic
agccccauggccauucagaugg

SEQ ID NO: 5372 - RNA, 22 nt, Artificial Sequence
  Synthetic
auccaucugaauggccaugggg

SEQ ID NO: 5373 - RNA, 22 nt, Artificial Sequence
  Synthetic
aucgcagaauccaucugaaugg

SEQ ID NO: 5374 - RNA, 22 nt, Artificial Sequence
  Synthetic
aucugaauggccauggggcucc

SEQ ID NO: 5375 - RNA, 22 nt, Artificial Sequence
  Synthetic
auggccauucagauggauucug

SEQ ID NO: 5376 - RNA, 22 nt, Artificial Sequence
  Synthetic
auucagauggauucugcgauga

SEQ ID NO: 5377 - RNA, 22 nt, Artificial Sequence
  Synthetic
auucggagccccauggccauuc

SEQ ID NO: 5378 - RNA, 22 nt, Artificial Sequence
  Synthetic
cagaauccaucugaauggccau

SEQ ID NO: 5379 - RNA, 22 nt, Artificial Sequence
  Synthetic
cagauggauucugcgaugacag

SEQ ID NO: 5380 - RNA, 22 nt, Artificial Sequence
  Synthetic
caucgcagaauccaucugaaug

SEQ ID NO: 5381 - RNA, 22 nt, Artificial Sequence
  Synthetic
caucugaauggccauggggcuc

SEQ ID NO: 5382 - RNA, 22 nt, Artificial Sequence
  Synthetic
cauggccauucagauggauucu

SEQ ID NO: 5383 - RNA, 22 nt, Artificial Sequence
  Synthetic
cauucagauggauucugcgaug

SEQ ID NO: 5384 - RNA, 22 nt, Artificial Sequence
  Synthetic
ccaucugaauggccauggggcu

SEQ ID NO: 5385 - RNA, 22 nt, Artificial Sequence
  Synthetic
ccauggccauucagauggauuc

SEQ ID NO: 5386 - RNA, 22 nt, Artificial Sequence
  Synthetic
ccauucagauggauucugcgau

SEQ ID NO: 5387 - RNA, 22 nt, Artificial Sequence
  Synthetic
cccauggccauucagauggauu

SEQ ID NO: 5388 - RNA, 22 nt, Artificial Sequence
  Synthetic
ccccauggccauucagauggau

SEQ ID NO: 5389 - RNA, 22 nt, Artificial Sequence
  Synthetic
cgcagaauccaucugaauggcc

SEQ ID NO: 5390 - RNA, 22 nt, Artificial Sequence
  Synthetic
cggagccccauggccauucaga

SEQ ID NO: 5391 - RNA, 22 nt, Artificial Sequence
  Synthetic
cugaauggccauggggcuccga

SEQ ID NO: 5392 - RNA, 22 nt, Artificial Sequence
  Synthetic
cugucaucgcagaauccaucug

SEQ ID NO: 5393 - RNA, 22 nt, Artificial Sequence
  Synthetic
gaauccaucugaauggccaugg

SEQ ID NO: 5394 - RNA, 22 nt, Artificial Sequence
  Synthetic
gagccccauggccauucagaug

SEQ ID NO: 5395 - RNA, 22 nt, Artificial Sequence
  Synthetic
gauucggagccccauggccauu

SEQ ID NO: 5396 - RNA, 22 nt, Artificial Sequence
  Synthetic
gcagaauccaucugaauggcca

SEQ ID NO: 5397 - RNA, 22 nt, Artificial Sequence
  Synthetic
gccauucagauggauucugcga

SEQ ID NO: 5398 - RNA, 22 nt, Artificial Sequence
  Synthetic
gccccauggccauucagaugga

SEQ ID NO: 5399 - RNA, 22 nt, Artificial Sequence
  Synthetic
gcugucaucgcagaauccaucu

SEQ ID NO: 5400 - RNA, 22 nt, Artificial Sequence
  Synthetic
ggagccccauggccauucagau

SEQ ID NO: 5401 - RNA, 22 nt, Artificial Sequence
  Synthetic
ggccauucagauggauucugcg

SEQ ID NO: 5402 - RNA, 22 nt, Artificial Sequence
  Synthetic
ggcugucaucgcagaauccauc

SEQ ID NO: 5403 - RNA, 22 nt, Artificial Sequence
  Synthetic
gucaucgcagaauccaucugaa

SEQ ID NO: 5404 - RNA, 22 nt, Artificial Sequence
  Synthetic
guggcugucaucgcagaaucca

SEQ ID NO: 5405 - RNA, 22 nt, Artificial Sequence
  Synthetic
ucagauggauucugcgaugaca

SEQ ID NO: 5406 - RNA, 22 nt, Artificial Sequence
  Synthetic
ucaucgcagaauccaucugaau

SEQ ID NO: 5407 - RNA, 22 nt, Artificial Sequence
  Synthetic
uccaucugaauggccauggggc

SEQ ID NO: 5408 - RNA, 22 nt, Artificial Sequence
  Synthetic
ucgcagaauccaucugaauggc

SEQ ID NO: 5409 - RNA, 22 nt, Artificial Sequence
  Synthetic
ucggagccccauggccauucag

SEQ ID NO: 5410 - RNA, 22 nt, Artificial Sequence
  Synthetic
ucugaauggccauggggcuccg

SEQ ID NO: 5411 - RNA, 22 nt, Artificial Sequence
  Synthetic
ugauucggagccccauggccau

SEQ ID NO: 5412 - RNA, 22 nt, Artificial Sequence
  Synthetic
uggccauucagauggauucugc

SEQ ID NO: 5413 - RNA, 22 nt, Artificial Sequence
  Synthetic
uggcugucaucgcagaauccau

SEQ ID NO: 5414 - RNA, 22 nt, Artificial Sequence
  Synthetic
ugucaucgcagaauccaucuga

SEQ ID NO: 5415 - RNA, 22 nt, Artificial Sequence
  Synthetic
uguggcugucaucgcagaaucc

SEQ ID NO: 5416 - RNA, 22 nt, Artificial Sequence
  Synthetic
uucagauggauucugcgaugac

SEQ ID NO: 5417 - RNA, 22 nt, Artificial Sequence
  Synthetic
uucggagccccauggccauuca

SEQ ID NO: 5418 - RNA, 22 nt, Artificial Sequence
  Synthetic
uugauucggagccccauggcca

SEQ ID NO: 5419 - RNA, 20 nt, Artificial Sequence
  Synthetic
acagccacaucuuuggaucc

SEQ ID NO: 5420 - RNA, 20 nt, Artificial Sequence
  Synthetic
acaucuuuggauccgugaga

SEQ ID NO: 5421 - RNA, 20 nt, Artificial Sequence
  Synthetic
acggauccaaagauguggcu

SEQ ID NO: 5422 - RNA, 20 nt, Artificial Sequence
  Synthetic
agccacaucuuuggauccgu

SEQ ID NO: 5423 - RNA, 20 nt, Artificial Sequence
  Synthetic
auccgugagacagacagaga

SEQ ID NO: 5424 - RNA, 20 nt, Artificial Sequence
  Synthetic
aucuuuggauccgugagaca

SEQ ID NO: 5425 - RNA, 20 nt, Artificial Sequence
  Synthetic
augacagccacaucuuugga

SEQ ID NO: 5426 - RNA, 20 nt, Artificial Sequence
  Synthetic
cacaucuuuggauccgugag

SEQ ID NO: 5427 - RNA, 20 nt, Artificial Sequence
  Synthetic
cacggauccaaagauguggc

SEQ ID NO: 5428 - RNA, 20 nt, Artificial Sequence
  Synthetic
cagccacaucuuuggauccg

SEQ ID NO: 5429 - RNA, 20 nt, Artificial Sequence
  Synthetic
caucuuuggauccgugagac

SEQ ID NO: 5430 - RNA, 20 nt, Artificial Sequence
  Synthetic
ccacaucuuuggauccguga

SEQ ID NO: 5431 - RNA, 20 nt, Artificial Sequence
  Synthetic
ccgugagacagacagagaag

SEQ ID NO: 5432 - RNA, 20 nt, Artificial Sequence
  Synthetic
ccuggcuucucugucugucu

SEQ ID NO: 5433 - RNA, 20 nt, Artificial Sequence
  Synthetic
cggauccaaagauguggcug

SEQ ID NO: 5434 - RNA, 20 nt, Artificial Sequence
  Synthetic
cucacggauccaaagaugug

SEQ ID NO: 5435 - RNA, 20 nt, Artificial Sequence
  Synthetic
cucugucugucucacggauc

SEQ ID NO: 5436 - RNA, 20 nt, Artificial Sequence
  Synthetic
cuggcuucucugucugucuc

SEQ ID NO: 5437 - RNA, 20 nt, Artificial Sequence
  Synthetic
cugucucacggauccaaaga

SEQ ID NO: 5438 - RNA, 20 nt, Artificial Sequence
  Synthetic
cugucugucucacggaucca

SEQ ID NO: 5439 - RNA, 20 nt, Artificial Sequence
  Synthetic
cuucucugucugucucacgg

SEQ ID NO: 5440 - RNA, 20 nt, Artificial Sequence
  Synthetic
cuuuggauccgugagacaga

SEQ ID NO: 5441 - RNA, 20 nt, Artificial Sequence
  Synthetic
gacagccacaucuuuggauc

SEQ ID NO: 5442 - RNA, 20 nt, Artificial Sequence
  Synthetic
gauccgugagacagacagag

SEQ ID NO: 5443 - RNA, 20 nt, Artificial Sequence
  Synthetic
gaugacagccacaucuuugg

SEQ ID NO: 5444 - RNA, 20 nt, Artificial Sequence
  Synthetic
gccacaucuuuggauccgug

SEQ ID NO: 5445 - RNA, 20 nt, Artificial Sequence
  Synthetic
gcuucucugucugucucacg

SEQ ID NO: 5446 - RNA, 20 nt, Artificial Sequence
  Synthetic
ggauccgugagacagacaga

SEQ ID NO: 5447 - RNA, 20 nt, Artificial Sequence
  Synthetic
ggcuucucugucugucucac

SEQ ID NO: 5448 - RNA, 20 nt, Artificial Sequence
  Synthetic
gucucacggauccaaagaug

SEQ ID NO: 5449 - RNA, 20 nt, Artificial Sequence
  Synthetic
gucugucucacggauccaaa

SEQ ID NO: 5450 - RNA, 20 nt, Artificial Sequence
  Synthetic
ucacggauccaaagaugugg

SEQ ID NO: 5451 - RNA, 20 nt, Artificial Sequence
  Synthetic
uccgugagacagacagagaa

SEQ ID NO: 5452 - RNA, 20 nt, Artificial Sequence
  Synthetic
ucucacggauccaaagaugu

SEQ ID NO: 5453 - RNA, 20 nt, Artificial Sequence
  Synthetic
ucucugucugucucacggau

SEQ ID NO: 5454 - RNA, 20 nt, Artificial Sequence
  Synthetic
ucugucucacggauccaaag

SEQ ID NO: 5455 - RNA, 20 nt, Artificial Sequence
  Synthetic
ucugucugucucacggaucc

SEQ ID NO: 5456 - RNA, 20 nt, Artificial Sequence
  Synthetic
ucuuuggauccgugagacag

SEQ ID NO: 5457 - RNA, 20 nt, Artificial Sequence
  Synthetic
ugacagccacaucuuuggau

SEQ ID NO: 5458 - RNA, 20 nt, Artificial Sequence
  Synthetic
uggauccgugagacagacag

SEQ ID NO: 5459 - RNA, 20 nt, Artificial Sequence
  Synthetic
uggcuucucugucugucuca

SEQ ID NO: 5460 - RNA, 20 nt, Artificial Sequence
  Synthetic
ugucucacggauccaaagau

SEQ ID NO: 5461 - RNA, 20 nt, Artificial Sequence
  Synthetic
ugucugucucacggauccaa

SEQ ID NO: 5462 - RNA, 20 nt, Artificial Sequence
  Synthetic
uucucugucugucucacgga

SEQ ID NO: 5463 - RNA, 20 nt, Artificial Sequence
  Synthetic
uuggauccgugagacagaca

SEQ ID NO: 5464 - RNA, 20 nt, Artificial Sequence
  Synthetic
uuuggauccgugagacagac

SEQ ID NO: 5465 - RNA, 21 nt, Artificial Sequence
  Synthetic
acagccacaucuuuggauccg

SEQ ID NO: 5466 - RNA, 21 nt, Artificial Sequence
  Synthetic
acaucuuuggauccgugagac

SEQ ID NO: 5467 - RNA, 21 nt, Artificial Sequence
  Synthetic
acggauccaaagauguggcug

SEQ ID NO: 5468 - RNA, 21 nt, Artificial Sequence
  Synthetic
agccacaucuuuggauccgug

SEQ ID NO: 5469 - RNA, 21 nt, Artificial Sequence
  Synthetic
auccgugagacagacagagaa

SEQ ID NO: 5470 - RNA, 21 nt, Artificial Sequence
  Synthetic
aucuuuggauccgugagacag

SEQ ID NO: 5471 - RNA, 21 nt, Artificial Sequence
  Synthetic
augacagccacaucuuuggau

SEQ ID NO: 5472 - RNA, 21 nt, Artificial Sequence
  Synthetic
cacaucuuuggauccgugaga

SEQ ID NO: 5473 - RNA, 21 nt, Artificial Sequence
  Synthetic
cacggauccaaagauguggcu

SEQ ID NO: 5474 - RNA, 21 nt, Artificial Sequence
  Synthetic
cagccacaucuuuggauccgu

SEQ ID NO: 5475 - RNA, 21 nt, Artificial Sequence
  Synthetic
caucuuuggauccgugagaca

SEQ ID NO: 5476 - RNA, 21 nt, Artificial Sequence
  Synthetic
ccacaucuuuggauccgugag

SEQ ID NO: 5477 - RNA, 21 nt, Artificial Sequence
  Synthetic
ccgugagacagacagagaagc

SEQ ID NO: 5478 - RNA, 21 nt, Artificial Sequence
  Synthetic
ccuggcuucucugucugucuc

SEQ ID NO: 5479 - RNA, 21 nt, Artificial Sequence
  Synthetic
cgaugacagccacaucuuugg

SEQ ID NO: 5480 - RNA, 21 nt, Artificial Sequence
  Synthetic
cggauccaaagauguggcugu

SEQ ID NO: 5481 - RNA, 21 nt, Artificial Sequence
  Synthetic
cucacggauccaaagaugugg

SEQ ID NO: 5482 - RNA, 21 nt, Artificial Sequence
  Synthetic
cucugucugucucacggaucc

SEQ ID NO: 5483 - RNA, 21 nt, Artificial Sequence
  Synthetic
cuggcuucucugucugucuca

SEQ ID NO: 5484 - RNA, 21 nt, Artificial Sequence
  Synthetic
cugucucacggauccaaagau

SEQ ID NO: 5485 - RNA, 21 nt, Artificial Sequence
  Synthetic
cugucugucucacggauccaa

SEQ ID NO: 5486 - RNA, 21 nt, Artificial Sequence
  Synthetic
cuucucugucugucucacgga

SEQ ID NO: 5487 - RNA, 21 nt, Artificial Sequence
  Synthetic
cuuuggauccgugagacagac

SEQ ID NO: 5488 - RNA, 21 nt, Artificial Sequence
  Synthetic
gacagccacaucuuuggaucc

SEQ ID NO: 5489 - RNA, 21 nt, Artificial Sequence
  Synthetic
gauccgugagacagacagaga

SEQ ID NO: 5490 - RNA, 21 nt, Artificial Sequence
  Synthetic
gaugacagccacaucuuugga

SEQ ID NO: 5491 - RNA, 21 nt, Artificial Sequence
  Synthetic
gccacaucuuuggauccguga

SEQ ID NO: 5492 - RNA, 21 nt, Artificial Sequence
  Synthetic
gcuucucugucugucucacgg

SEQ ID NO: 5493 - RNA, 21 nt, Artificial Sequence
  Synthetic
ggauccgugagacagacagag

SEQ ID NO: 5494 - RNA, 21 nt, Artificial Sequence
  Synthetic
ggcuucucugucugucucacg

SEQ ID NO: 5495 - RNA, 21 nt, Artificial Sequence
  Synthetic
gucucacggauccaaagaugu

SEQ ID NO: 5496 - RNA, 21 nt, Artificial Sequence
  Synthetic
gucugucucacggauccaaag

SEQ ID NO: 5497 - RNA, 21 nt, Artificial Sequence
  Synthetic
ucacggauccaaagauguggc

SEQ ID NO: 5498 - RNA, 21 nt, Artificial Sequence
  Synthetic
uccgugagacagacagagaag

SEQ ID NO: 5499 - RNA, 21 nt, Artificial Sequence
  Synthetic
uccuggcuucucugucugucu

SEQ ID NO: 5500 - RNA, 21 nt, Artificial Sequence
  Synthetic
ucucacggauccaaagaugug

SEQ ID NO: 5501 - RNA, 21 nt, Artificial Sequence
  Synthetic
ucucugucugucucacggauc

SEQ ID NO: 5502 - RNA, 21 nt, Artificial Sequence
  Synthetic
ucugucucacggauccaaaga

SEQ ID NO: 5503 - RNA, 21 nt, Artificial Sequence
  Synthetic
ucugucugucucacggaucca

SEQ ID NO: 5504 - RNA, 21 nt, Artificial Sequence
  Synthetic
ucuuuggauccgugagacaga

SEQ ID NO: 5505 - RNA, 21 nt, Artificial Sequence
  Synthetic
ugacagccacaucuuuggauc

SEQ ID NO: 5506 - RNA, 21 nt, Artificial Sequence
  Synthetic
uggauccgugagacagacaga

SEQ ID NO: 5507 - RNA, 21 nt, Artificial Sequence
  Synthetic
uggcuucucugucugucucac

SEQ ID NO: 5508 - RNA, 21 nt, Artificial Sequence
  Synthetic
ugucucacggauccaaagaug

SEQ ID NO: 5509 - RNA, 21 nt, Artificial Sequence
  Synthetic
ugucugucucacggauccaaa

SEQ ID NO: 5510 - RNA, 21 nt, Artificial Sequence
  Synthetic
uucucugucugucucacggau

SEQ ID NO: 5511 - RNA, 21 nt, Artificial Sequence
  Synthetic
uuggauccgugagacagacag

SEQ ID NO: 5512 - RNA, 21 nt, Artificial Sequence
  Synthetic
uuuggauccgugagacagaca

SEQ ID NO: 5513 - RNA, 22 nt, Artificial Sequence
  Synthetic
acagccacaucuuuggauccgu

SEQ ID NO: 5514 - RNA, 22 nt, Artificial Sequence
  Synthetic
acaucuuuggauccgugagaca

SEQ ID NO: 5515 - RNA, 22 nt, Artificial Sequence
  Synthetic
acggauccaaagauguggcugu

SEQ ID NO: 5516 - RNA, 22 nt, Artificial Sequence
  Synthetic
agccacaucuuuggauccguga

SEQ ID NO: 5517 - RNA, 22 nt, Artificial Sequence
  Synthetic
auccgugagacagacagagaag

SEQ ID NO: 5518 - RNA, 22 nt, Artificial Sequence
  Synthetic
aucuuuggauccgugagacaga

SEQ ID NO: 5519 - RNA, 22 nt, Artificial Sequence
  Synthetic
augacagccacaucuuuggauc

SEQ ID NO: 5520 - RNA, 22 nt, Artificial Sequence
  Synthetic
cacaucuuuggauccgugagac

SEQ ID NO: 5521 - RNA, 22 nt, Artificial Sequence
  Synthetic
cacggauccaaagauguggcug

SEQ ID NO: 5522 - RNA, 22 nt, Artificial Sequence
  Synthetic
cagccacaucuuuggauccgug

SEQ ID NO: 5523 - RNA, 22 nt, Artificial Sequence
  Synthetic
caucuuuggauccgugagacag

SEQ ID NO: 5524 - RNA, 22 nt, Artificial Sequence
  Synthetic
ccacaucuuuggauccgugaga

SEQ ID NO: 5525 - RNA, 22 nt, Artificial Sequence
  Synthetic
ccgugagacagacagagaagcc

SEQ ID NO: 5526 - RNA, 22 nt, Artificial Sequence
  Synthetic
ccuggcuucucugucugucuca

SEQ ID NO: 5527 - RNA, 22 nt, Artificial Sequence
  Synthetic
cgaugacagccacaucuuugga

SEQ ID NO: 5528 - RNA, 22 nt, Artificial Sequence
  Synthetic
cggauccaaagauguggcuguc

SEQ ID NO: 5529 - RNA, 22 nt, Artificial Sequence
  Synthetic
cucacggauccaaagauguggc

SEQ ID NO: 5530 - RNA, 22 nt, Artificial Sequence
  Synthetic
cuccuggcuucucugucugucu

SEQ ID NO: 5531 - RNA, 22 nt, Artificial Sequence
  Synthetic
cucugucugucucacggaucca

SEQ ID NO: 5532 - RNA, 22 nt, Artificial Sequence
  Synthetic
cuggcuucucugucugucucac

SEQ ID NO: 5533 - RNA, 22 nt, Artificial Sequence
  Synthetic
cugucucacggauccaaagaug

SEQ ID NO: 5534 - RNA, 22 nt, Artificial Sequence
  Synthetic
cugucugucucacggauccaaa

SEQ ID NO: 5535 - RNA, 22 nt, Artificial Sequence
  Synthetic
cuucucugucugucucacggau

SEQ ID NO: 5536 - RNA, 22 nt, Artificial Sequence
  Synthetic
cuuuggauccgugagacagaca

SEQ ID NO: 5537 - RNA, 22 nt, Artificial Sequence
  Synthetic
gacagccacaucuuuggauccg

SEQ ID NO: 5538 - RNA, 22 nt, Artificial Sequence
  Synthetic
gauccgugagacagacagagaa

SEQ ID NO: 5539 - RNA, 22 nt, Artificial Sequence
  Synthetic
gaugacagccacaucuuuggau

SEQ ID NO: 5540 - RNA, 22 nt, Artificial Sequence
  Synthetic
gccacaucuuuggauccgugag

SEQ ID NO: 5541 - RNA, 22 nt, Artificial Sequence
  Synthetic
gcgaugacagccacaucuuugg

SEQ ID NO: 5542 - RNA, 22 nt, Artificial Sequence
  Synthetic
gcuucucugucugucucacgga

SEQ ID NO: 5543 - RNA, 22 nt, Artificial Sequence
  Synthetic
ggauccgugagacagacagaga

SEQ ID NO: 5544 - RNA, 22 nt, Artificial Sequence
  Synthetic
ggcuucucugucugucucacgg

SEQ ID NO: 5545 - RNA, 22 nt, Artificial Sequence
  Synthetic
gucucacggauccaaagaugug

SEQ ID NO: 5546 - RNA, 22 nt, Artificial Sequence
  Synthetic
gucugucucacggauccaaaga

SEQ ID NO: 5547 - RNA, 22 nt, Artificial Sequence
  Synthetic
ucacggauccaaagauguggcu

SEQ ID NO: 5548 - RNA, 22 nt, Artificial Sequence
  Synthetic
uccgugagacagacagagaagc

SEQ ID NO: 5549 - RNA, 22 nt, Artificial Sequence
  Synthetic
uccuggcuucucugucugucuc

SEQ ID NO: 5550 - RNA, 22 nt, Artificial Sequence
  Synthetic
ucucacggauccaaagaugugg

SEQ ID NO: 5551 - RNA, 22 nt, Artificial Sequence
  Synthetic
ucucugucugucucacggaucc

SEQ ID NO: 5552 - RNA, 22 nt, Artificial Sequence
  Synthetic
ucugucucacggauccaaagau

SEQ ID NO: 5553 - RNA, 22 nt, Artificial Sequence
  Synthetic
ucugucugucucacggauccaa

SEQ ID NO: 5554 - RNA, 22 nt, Artificial Sequence
  Synthetic
ucuuuggauccgugagacagac

SEQ ID NO: 5555 - RNA, 22 nt, Artificial Sequence
  Synthetic
ugacagccacaucuuuggaucc

SEQ ID NO: 5556 - RNA, 22 nt, Artificial Sequence
  Synthetic
uggauccgugagacagacagag

SEQ ID NO: 5557 - RNA, 22 nt, Artificial Sequence
  Synthetic
uggcuucucugucugucucacg

SEQ ID NO: 5558 - RNA, 22 nt, Artificial Sequence
  Synthetic
ugucucacggauccaaagaugu

SEQ ID NO: 5559 - RNA, 22 nt, Artificial Sequence
  Synthetic
ugucugucucacggauccaaag

SEQ ID NO: 5560 - RNA, 22 nt, Artificial Sequence
  Synthetic
uucucugucugucucacggauc

SEQ ID NO: 5561 - RNA, 22 nt, Artificial Sequence
  Synthetic
uuggauccgugagacagacaga

SEQ ID NO: 5562 - RNA, 22 nt, Artificial Sequence
  Synthetic
uuuggauccgugagacagacag

SEQ ID NO: 5563 - RNA, 20 nt, Artificial Sequence
  Synthetic
aaaaucauuuauuuggauca

SEQ ID NO: 5564 - RNA, 20 nt, Artificial Sequence
  Synthetic
aaaucauuuauuuggaucac

SEQ ID NO: 5565 - RNA, 20 nt, Artificial Sequence
  Synthetic
aaucaaaaucauuuauuugg

SEQ ID NO: 5566 - RNA, 20 nt, Artificial Sequence
  Synthetic
aaucauuuauuuggaucaca

SEQ ID NO: 5567 - RNA, 20 nt, Artificial Sequence
  Synthetic
accugugauccaaauaaaug

SEQ ID NO: 5568 - RNA, 20 nt, Artificial Sequence
  Synthetic
auauucucucucaccuguga

SEQ ID NO: 5569 - RNA, 20 nt, Artificial Sequence
  Synthetic
aucaaaaucauuuauuugga

SEQ ID NO: 5570 - RNA, 20 nt, Artificial Sequence
  Synthetic
aucauuuauuuggaucacag

SEQ ID NO: 5571 - RNA, 20 nt, Artificial Sequence
  Synthetic
auccaaauaaaugauuuuga

SEQ ID NO: 5572 - RNA, 20 nt, Artificial Sequence
  Synthetic
auucucucucaccugugauc

SEQ ID NO: 5573 - RNA, 20 nt, Artificial Sequence
  Synthetic
auuggaaucaaaaucauuua

SEQ ID NO: 5574 - RNA, 20 nt, Artificial Sequence
  Synthetic
auuuauuuggaucacaggug

SEQ ID NO: 5575 - RNA, 20 nt, Artificial Sequence
  Synthetic
auuuggaucacaggugagag

SEQ ID NO: 5576 - RNA, 20 nt, Artificial Sequence
  Synthetic
caaaaucauuuauuuggauc

SEQ ID NO: 5577 - RNA, 20 nt, Artificial Sequence
  Synthetic
caaauaaaugauuuugauuc

SEQ ID NO: 5578 - RNA, 20 nt, Artificial Sequence
  Synthetic
caccugugauccaaauaaau

SEQ ID NO: 5579 - RNA, 20 nt, Artificial Sequence
  Synthetic
cauuuauuuggaucacaggu

SEQ ID NO: 5580 - RNA, 20 nt, Artificial Sequence
  Synthetic
ccaaauaaaugauuuugauu

SEQ ID NO: 5581 - RNA, 20 nt, Artificial Sequence
  Synthetic
ccugugauccaaauaaauga

SEQ ID NO: 5582 - RNA, 20 nt, Artificial Sequence
  Synthetic
cucaccugugauccaaauaa

SEQ ID NO: 5583 - RNA, 20 nt, Artificial Sequence
  Synthetic
cucucaccugugauccaaau

SEQ ID NO: 5584 - RNA, 20 nt, Artificial Sequence
  Synthetic
cucucucaccugugauccaa

SEQ ID NO: 5585 - RNA, 20 nt, Artificial Sequence
  Synthetic
cugugauccaaauaaaugau

SEQ ID NO: 5586 - RNA, 20 nt, Artificial Sequence
  Synthetic
gaaucaaaaucauuuauuug

SEQ ID NO: 5587 - RNA, 20 nt, Artificial Sequence
  Synthetic
gauccaaauaaaugauuuug

SEQ ID NO: 5588 - RNA, 20 nt, Artificial Sequence
  Synthetic
ggaaucaaaaucauuuauuu

SEQ ID NO: 5589 - RNA, 20 nt, Artificial Sequence
  Synthetic
gugauccaaauaaaugauuu

SEQ ID NO: 5590 - RNA, 20 nt, Artificial Sequence
  Synthetic
uauucucucucaccugugau

SEQ ID NO: 5591 - RNA, 20 nt, Artificial Sequence
  Synthetic
uauuggaaucaaaaucauuu

SEQ ID NO: 5592 - RNA, 20 nt, Artificial Sequence
  Synthetic
uauuuggaucacaggugaga

SEQ ID NO: 5593 - RNA, 20 nt, Artificial Sequence
  Synthetic
ucaaaaucauuuauuuggau

SEQ ID NO: 5594 - RNA, 20 nt, Artificial Sequence
  Synthetic
ucaccugugauccaaauaaa

SEQ ID NO: 5595 - RNA, 20 nt, Artificial Sequence
  Synthetic
ucauuuauuuggaucacagg

SEQ ID NO: 5596 - RNA, 20 nt, Artificial Sequence
  Synthetic
uccaaauaaaugauuuugau

SEQ ID NO: 5597 - RNA, 20 nt, Artificial Sequence
  Synthetic
ucucaccugugauccaaaua

SEQ ID NO: 5598 - RNA, 20 nt, Artificial Sequence
  Synthetic
ucucucaccugugauccaaa

SEQ ID NO: 5599 - RNA, 20 nt, Artificial Sequence
  Synthetic
ucucucucaccugugaucca

SEQ ID NO: 5600 - RNA, 20 nt, Artificial Sequence
  Synthetic
ugauccaaauaaaugauuuu

SEQ ID NO: 5601 - RNA, 20 nt, Artificial Sequence
  Synthetic
uggaaucaaaaucauuuauu

SEQ ID NO: 5602 - RNA, 20 nt, Artificial Sequence
  Synthetic
ugugauccaaauaaaugauu

SEQ ID NO: 5603 - RNA, 20 nt, Artificial Sequence
  Synthetic
uuauuuggaucacaggugag

SEQ ID NO: 5604 - RNA, 20 nt, Artificial Sequence
  Synthetic
uucucucucaccugugaucc

SEQ ID NO: 5605 - RNA, 20 nt, Artificial Sequence
  Synthetic
uuggaaucaaaaucauuuau

SEQ ID NO: 5606 - RNA, 20 nt, Artificial Sequence
  Synthetic
uuggaucacaggugagagag

SEQ ID NO: 5607 - RNA, 20 nt, Artificial Sequence
  Synthetic
uuuauuuggaucacagguga

SEQ ID NO: 5608 - RNA, 20 nt, Artificial Sequence
  Synthetic
uuuggaucacaggugagaga

SEQ ID NO: 5609 - RNA, 21 nt, Artificial Sequence
  Synthetic
aaaaucauuuauuuggaucac

SEQ ID NO: 5610 - RNA, 21 nt, Artificial Sequence
  Synthetic
aaaucauuuauuuggaucaca

SEQ ID NO: 5611 - RNA, 21 nt, Artificial Sequence
  Synthetic
aauauucucucucaccuguga

SEQ ID NO: 5612 - RNA, 21 nt, Artificial Sequence
  Synthetic
aaucaaaaucauuuauuugga

SEQ ID NO: 5613 - RNA, 21 nt, Artificial Sequence
  Synthetic
aaucauuuauuuggaucacag

SEQ ID NO: 5614 - RNA, 21 nt, Artificial Sequence
  Synthetic
accugugauccaaauaaauga

SEQ ID NO: 5615 - RNA, 21 nt, Artificial Sequence
  Synthetic
auauucucucucaccugugau

SEQ ID NO: 5616 - RNA, 21 nt, Artificial Sequence
  Synthetic
aucaaaaucauuuauuuggau

SEQ ID NO: 5617 - RNA, 21 nt, Artificial Sequence
  Synthetic
aucauuuauuuggaucacagg

SEQ ID NO: 5618 - RNA, 21 nt, Artificial Sequence
  Synthetic
auccaaauaaaugauuuugau

SEQ ID NO: 5619 - RNA, 21 nt, Artificial Sequence
  Synthetic
auucucucucaccugugaucc

SEQ ID NO: 5620 - RNA, 21 nt, Artificial Sequence
  Synthetic
auuggaaucaaaaucauuuau

SEQ ID NO: 5621 - RNA, 21 nt, Artificial Sequence
  Synthetic
auuuauuuggaucacagguga

SEQ ID NO: 5622 - RNA, 21 nt, Artificial Sequence
  Synthetic
auuuggaucacaggugagaga

SEQ ID NO: 5623 - RNA, 21 nt, Artificial Sequence
  Synthetic
caaaaucauuuauuuggauca

SEQ ID NO: 5624 - RNA, 21 nt, Artificial Sequence
  Synthetic
caaauaaaugauuuugauucc

SEQ ID NO: 5625 - RNA, 21 nt, Artificial Sequence
  Synthetic
caccugugauccaaauaaaug

SEQ ID NO: 5626 - RNA, 21 nt, Artificial Sequence
  Synthetic
cauuuauuuggaucacaggug

SEQ ID NO: 5627 - RNA, 21 nt, Artificial Sequence
  Synthetic
ccaaauaaaugauuuugauuc

SEQ ID NO: 5628 - RNA, 21 nt, Artificial Sequence
  Synthetic
ccugugauccaaauaaaugau

SEQ ID NO: 5629 - RNA, 21 nt, Artificial Sequence
  Synthetic
cucaccugugauccaaauaaa

SEQ ID NO: 5630 - RNA, 21 nt, Artificial Sequence
  Synthetic
cucucaccugugauccaaaua

SEQ ID NO: 5631 - RNA, 21 nt, Artificial Sequence
  Synthetic
cucucucaccugugauccaaa

SEQ ID NO: 5632 - RNA, 21 nt, Artificial Sequence
  Synthetic
cugugauccaaauaaaugauu

SEQ ID NO: 5633 - RNA, 21 nt, Artificial Sequence
  Synthetic
gaaucaaaaucauuuauuugg

SEQ ID NO: 5634 - RNA, 21 nt, Artificial Sequence
  Synthetic
gauccaaauaaaugauuuuga

SEQ ID NO: 5635 - RNA, 21 nt, Artificial Sequence
  Synthetic
ggaaucaaaaucauuuauuug

SEQ ID NO: 5636 - RNA, 21 nt, Artificial Sequence
  Synthetic
gugauccaaauaaaugauuuu

SEQ ID NO: 5637 - RNA, 21 nt, Artificial Sequence
  Synthetic
uauucucucucaccugugauc

SEQ ID NO: 5638 - RNA, 21 nt, Artificial Sequence
  Synthetic
uauuggaaucaaaaucauuua

SEQ ID NO: 5639 - RNA, 21 nt, Artificial Sequence
  Synthetic
uauuuggaucacaggugagag

SEQ ID NO: 5640 - RNA, 21 nt, Artificial Sequence
  Synthetic
ucaaaaucauuuauuuggauc

SEQ ID NO: 5641 - RNA, 21 nt, Artificial Sequence
  Synthetic
ucaccugugauccaaauaaau

SEQ ID NO: 5642 - RNA, 21 nt, Artificial Sequence
  Synthetic
ucauuuauuuggaucacaggu

SEQ ID NO: 5643 - RNA, 21 nt, Artificial Sequence
  Synthetic
uccaaauaaaugauuuugauu

SEQ ID NO: 5644 - RNA, 21 nt, Artificial Sequence
  Synthetic
ucucaccugugauccaaauaa

SEQ ID NO: 5645 - RNA, 21 nt, Artificial Sequence
  Synthetic
ucucucaccugugauccaaau

SEQ ID NO: 5646 - RNA, 21 nt, Artificial Sequence
  Synthetic
ucucucucaccugugauccaa

SEQ ID NO: 5647 - RNA, 21 nt, Artificial Sequence
  Synthetic
ugauccaaauaaaugauuuug

SEQ ID NO: 5648 - RNA, 21 nt, Artificial Sequence
  Synthetic
uggaaucaaaaucauuuauuu

SEQ ID NO: 5649 - RNA, 21 nt, Artificial Sequence
  Synthetic
ugugauccaaauaaaugauuu

SEQ ID NO: 5650 - RNA, 21 nt, Artificial Sequence
  Synthetic
uuauuggaaucaaaaucauuu

SEQ ID NO: 5651 - RNA, 21 nt, Artificial Sequence
  Synthetic
uuauuuggaucacaggugaga

SEQ ID NO: 5652 - RNA, 21 nt, Artificial Sequence
  Synthetic
uucucucucaccugugaucca

SEQ ID NO: 5653 - RNA, 21 nt, Artificial Sequence
  Synthetic
uuggaaucaaaaucauuuauu

SEQ ID NO: 5654 - RNA, 21 nt, Artificial Sequence
  Synthetic
uuggaucacaggugagagaga

SEQ ID NO: 5655 - RNA, 21 nt, Artificial Sequence
  Synthetic
uuuauuuggaucacaggugag

SEQ ID NO: 5656 - RNA, 21 nt, Artificial Sequence
  Synthetic
uuuggaucacaggugagagag

SEQ ID NO: 5657 - RNA, 22 nt, Artificial Sequence
  Synthetic
aaaaucauuuauuuggaucaca

SEQ ID NO: 5658 - RNA, 22 nt, Artificial Sequence
  Synthetic
aaaucauuuauuuggaucacag

SEQ ID NO: 5659 - RNA, 22 nt, Artificial Sequence
  Synthetic
aauauucucucucaccugugau

SEQ ID NO: 5660 - RNA, 22 nt, Artificial Sequence
  Synthetic
aaucaaaaucauuuauuuggau

SEQ ID NO: 5661 - RNA, 22 nt, Artificial Sequence
  Synthetic
aaucauuuauuuggaucacagg

SEQ ID NO: 5662 - RNA, 22 nt, Artificial Sequence
  Synthetic
accugugauccaaauaaaugau

SEQ ID NO: 5663 - RNA, 22 nt, Artificial Sequence
  Synthetic
auauucucucucaccugugauc

SEQ ID NO: 5664 - RNA, 22 nt, Artificial Sequence
  Synthetic
aucaaaaucauuuauuuggauc

SEQ ID NO: 5665 - RNA, 22 nt, Artificial Sequence
  Synthetic
aucauuuauuuggaucacaggu

SEQ ID NO: 5666 - RNA, 22 nt, Artificial Sequence
  Synthetic
auccaaauaaaugauuuugauu

SEQ ID NO: 5667 - RNA, 22 nt, Artificial Sequence
  Synthetic
auucucucucaccugugaucca

SEQ ID NO: 5668 - RNA, 22 nt, Artificial Sequence
  Synthetic
auuggaaucaaaaucauuuauu

SEQ ID NO: 5669 - RNA, 22 nt, Artificial Sequence
  Synthetic
auuuauuuggaucacaggugag

SEQ ID NO: 5670 - RNA, 22 nt, Artificial Sequence
  Synthetic
auuuggaucacaggugagagag

SEQ ID NO: 5671 - RNA, 22 nt, Artificial Sequence
  Synthetic
caaaaucauuuauuuggaucac

SEQ ID NO: 5672 - RNA, 22 nt, Artificial Sequence
  Synthetic
caaauaaaugauuuugauucca

SEQ ID NO: 5673 - RNA, 22 nt, Artificial Sequence
  Synthetic
caauauucucucucaccuguga

SEQ ID NO: 5674 - RNA, 22 nt, Artificial Sequence
  Synthetic
caccugugauccaaauaaauga

SEQ ID NO: 5675 - RNA, 22 nt, Artificial Sequence
  Synthetic
cauuuauuuggaucacagguga

SEQ ID NO: 5676 - RNA, 22 nt, Artificial Sequence
  Synthetic
ccaaauaaaugauuuugauucc

SEQ ID NO: 5677 - RNA, 22 nt, Artificial Sequence
  Synthetic
ccugugauccaaauaaaugauu

SEQ ID NO: 5678 - RNA, 22 nt, Artificial Sequence
  Synthetic
cucaccugugauccaaauaaau

SEQ ID NO: 5679 - RNA, 22 nt, Artificial Sequence
  Synthetic
cucucaccugugauccaaauaa

SEQ ID NO: 5680 - RNA, 22 nt, Artificial Sequence
  Synthetic
cucucucaccugugauccaaau

SEQ ID NO: 5681 - RNA, 22 nt, Artificial Sequence
  Synthetic
cugugauccaaauaaaugauuu

SEQ ID NO: 5682 - RNA, 22 nt, Artificial Sequence
  Synthetic
gaaucaaaaucauuuauuugga

SEQ ID NO: 5683 - RNA, 22 nt, Artificial Sequence
  Synthetic
gauccaaauaaaugauuuugau

SEQ ID NO: 5684 - RNA, 22 nt, Artificial Sequence
  Synthetic
ggaaucaaaaucauuuauuugg

SEQ ID NO: 5685 - RNA, 22 nt, Artificial Sequence
  Synthetic
gugauccaaauaaaugauuuug

SEQ ID NO: 5686 - RNA, 22 nt, Artificial Sequence
  Synthetic
uauucucucucaccugugaucc

SEQ ID NO: 5687 - RNA, 22 nt, Artificial Sequence
  Synthetic
uauuggaaucaaaaucauuuau

SEQ ID NO: 5688 - RNA, 22 nt, Artificial Sequence
  Synthetic
uauuuggaucacaggugagaga

SEQ ID NO: 5689 - RNA, 22 nt, Artificial Sequence
  Synthetic
ucaaaaucauuuauuuggauca

SEQ ID NO: 5690 - RNA, 22 nt, Artificial Sequence
  Synthetic
ucaccugugauccaaauaaaug

SEQ ID NO: 5691 - RNA, 22 nt, Artificial Sequence
  Synthetic
ucauuuauuuggaucacaggug

SEQ ID NO: 5692 - RNA, 22 nt, Artificial Sequence
  Synthetic
uccaaauaaaugauuuugauuc

SEQ ID NO: 5693 - RNA, 22 nt, Artificial Sequence
  Synthetic
ucucaccugugauccaaauaaa

SEQ ID NO: 5694 - RNA, 22 nt, Artificial Sequence
  Synthetic
ucucucaccugugauccaaaua

SEQ ID NO: 5695 - RNA, 22 nt, Artificial Sequence
  Synthetic
ucucucucaccugugauccaaa

SEQ ID NO: 5696 - RNA, 22 nt, Artificial Sequence
  Synthetic
ugauccaaauaaaugauuuuga

SEQ ID NO: 5697 - RNA, 22 nt, Artificial Sequence
  Synthetic
uggaaucaaaaucauuuauuug

SEQ ID NO: 5698 - RNA, 22 nt, Artificial Sequence
  Synthetic
ugugauccaaauaaaugauuuu

SEQ ID NO: 5699 - RNA, 22 nt, Artificial Sequence
  Synthetic
uuauuggaaucaaaaucauuua

SEQ ID NO: 5700 - RNA, 22 nt, Artificial Sequence
  Synthetic
uuauuuggaucacaggugagag

SEQ ID NO: 5701 - RNA, 22 nt, Artificial Sequence
  Synthetic
uucucucucaccugugauccaa

SEQ ID NO: 5702 - RNA, 22 nt, Artificial Sequence
  Synthetic
uuggaaucaaaaucauuuauuu

SEQ ID NO: 5703 - RNA, 22 nt, Artificial Sequence
  Synthetic
uuggaucacaggugagagagaa

SEQ ID NO: 5704 - RNA, 22 nt, Artificial Sequence
  Synthetic
uuuauuggaaucaaaaucauuu

SEQ ID NO: 5705 - RNA, 22 nt, Artificial Sequence
  Synthetic
uuuauuuggaucacaggugaga

SEQ ID NO: 5706 - RNA, 22 nt, Artificial Sequence
  Synthetic
uuuggaucacaggugagagaga

SEQ ID NO: 5707 - RNA, 20 nt, Artificial Sequence
  Synthetic
aagagucgucagugaagacu

SEQ ID NO: 5708 - RNA, 20 nt, Artificial Sequence
  Synthetic
aagucuucacugacgacucu

SEQ ID NO: 5709 - RNA, 20 nt, Artificial Sequence
  Synthetic
accaugacgaagagucguca

SEQ ID NO: 5710 - RNA, 20 nt, Artificial Sequence
  Synthetic
acgaagagucgucagugaag

SEQ ID NO: 5711 - RNA, 20 nt, Artificial Sequence
  Synthetic
acgacucuucgucauggugc

SEQ ID NO: 5712 - RNA, 20 nt, Artificial Sequence
  Synthetic
acugacgacucuucgucaug

SEQ ID NO: 5713 - RNA, 20 nt, Artificial Sequence
  Synthetic
agagcaccaugacgaagagu

SEQ ID NO: 5714 - RNA, 20 nt, Artificial Sequence
  Synthetic
agagucgucagugaagacuu

SEQ ID NO: 5715 - RNA, 20 nt, Artificial Sequence
  Synthetic
agcaccaugacgaagagucg

SEQ ID NO: 5716 - RNA, 20 nt, Artificial Sequence
  Synthetic
agucgucagugaagacuuac

SEQ ID NO: 5717 - RNA, 20 nt, Artificial Sequence
  Synthetic
agucuucacugacgacucuu

SEQ ID NO: 5718 - RNA, 20 nt, Artificial Sequence
  Synthetic
augacgaagagucgucagug

SEQ ID NO: 5719 - RNA, 20 nt, Artificial Sequence
  Synthetic
caccaugacgaagagucguc

SEQ ID NO: 5720 - RNA, 20 nt, Artificial Sequence
  Synthetic
cacugacgacucuucgucau

SEQ ID NO: 5721 - RNA, 20 nt, Artificial Sequence
  Synthetic
caugacgaagagucgucagu

SEQ ID NO: 5722 - RNA, 20 nt, Artificial Sequence
  Synthetic
ccaugacgaagagucgucag

SEQ ID NO: 5723 - RNA, 20 nt, Artificial Sequence
  Synthetic
ccugguaagucuucacugac

SEQ ID NO: 5724 - RNA, 20 nt, Artificial Sequence
  Synthetic
cgaagagucgucagugaaga

SEQ ID NO: 5725 - RNA, 20 nt, Artificial Sequence
  Synthetic
cgacucuucgucauggugcu

SEQ ID NO: 5726 - RNA, 20 nt, Artificial Sequence
  Synthetic
cugacgacucuucgucaugg

SEQ ID NO: 5727 - RNA, 20 nt, Artificial Sequence
  Synthetic
cugguaagucuucacugacg

SEQ ID NO: 5728 - RNA, 20 nt, Artificial Sequence
  Synthetic
cuucacugacgacucuucgu

SEQ ID NO: 5729 - RNA, 20 nt, Artificial Sequence
  Synthetic
cuuccugguaagucuucacu

SEQ ID NO: 5730 - RNA, 20 nt, Artificial Sequence
  Synthetic
gaagagucgucagugaagac

SEQ ID NO: 5731 - RNA, 20 nt, Artificial Sequence
  Synthetic
gacgaagagucgucagugaa

SEQ ID NO: 5732 - RNA, 20 nt, Artificial Sequence
  Synthetic
gacgacucuucgucauggug

SEQ ID NO: 5733 - RNA, 20 nt, Artificial Sequence
  Synthetic
gagagcaccaugacgaagag

SEQ ID NO: 5734 - RNA, 20 nt, Artificial Sequence
  Synthetic
gagcaccaugacgaagaguc

SEQ ID NO: 5735 - RNA, 20 nt, Artificial Sequence
  Synthetic
gagucgucagugaagacuua

SEQ ID NO: 5736 - RNA, 20 nt, Artificial Sequence
  Synthetic
gcaccaugacgaagagucgu

SEQ ID NO: 5737 - RNA, 20 nt, Artificial Sequence
  Synthetic
ggagagcaccaugacgaaga

SEQ ID NO: 5738 - RNA, 20 nt, Artificial Sequence
  Synthetic
gguaagucuucacugacgac

SEQ ID NO: 5739 - RNA, 20 nt, Artificial Sequence
  Synthetic
guaagucuucacugacgacu

SEQ ID NO: 5740 - RNA, 20 nt, Artificial Sequence
  Synthetic
gucgucagugaagacuuacc

SEQ ID NO: 5741 - RNA, 20 nt, Artificial Sequence
  Synthetic
gucuucacugacgacucuuc

SEQ ID NO: 5742 - RNA, 20 nt, Artificial Sequence
  Synthetic
uaagucuucacugacgacuc

SEQ ID NO: 5743 - RNA, 20 nt, Artificial Sequence
  Synthetic
ucacugacgacucuucguca

SEQ ID NO: 5744 - RNA, 20 nt, Artificial Sequence
  Synthetic
uccugguaagucuucacuga

SEQ ID NO: 5745 - RNA, 20 nt, Artificial Sequence
  Synthetic
ucgucagugaagacuuacca

SEQ ID NO: 5746 - RNA, 20 nt, Artificial Sequence
  Synthetic
ucuucacugacgacucuucg

SEQ ID NO: 5747 - RNA, 20 nt, Artificial Sequence
  Synthetic
ugacgaagagucgucaguga

SEQ ID NO: 5748 - RNA, 20 nt, Artificial Sequence
  Synthetic
ugacgacucuucgucauggu

SEQ ID NO: 5749 - RNA, 20 nt, Artificial Sequence
  Synthetic
uggagagcaccaugacgaag

SEQ ID NO: 5750 - RNA, 20 nt, Artificial Sequence
  Synthetic
ugguaagucuucacugacga

SEQ ID NO: 5751 - RNA, 20 nt, Artificial Sequence
  Synthetic
uucacugacgacucuucguc

SEQ ID NO: 5752 - RNA, 20 nt, Artificial Sequence
  Synthetic
uuccugguaagucuucacug

SEQ ID NO: 5753 - RNA, 21 nt, Artificial Sequence
  Synthetic
aagagucgucagugaagacuu

SEQ ID NO: 5754 - RNA, 21 nt, Artificial Sequence
  Synthetic
aagucuucacugacgacucuu

SEQ ID NO: 5755 - RNA, 21 nt, Artificial Sequence
  Synthetic
accaugacgaagagucgucag

SEQ ID NO: 5756 - RNA, 21 nt, Artificial Sequence
  Synthetic
acgaagagucgucagugaaga

SEQ ID NO: 5757 - RNA, 21 nt, Artificial Sequence
  Synthetic
acgacucuucgucauggugcu

SEQ ID NO: 5758 - RNA, 21 nt, Artificial Sequence
  Synthetic
acugacgacucuucgucaugg

SEQ ID NO: 5759 - RNA, 21 nt, Artificial Sequence
  Synthetic
acuuccugguaagucuucacu

SEQ ID NO: 5760 - RNA, 21 nt, Artificial Sequence
  Synthetic
agagcaccaugacgaagaguc

SEQ ID NO: 5761 - RNA, 21 nt, Artificial Sequence
  Synthetic
agagucgucagugaagacuua

SEQ ID NO: 5762 - RNA, 21 nt, Artificial Sequence
  Synthetic
agcaccaugacgaagagucgu

SEQ ID NO: 5763 - RNA, 21 nt, Artificial Sequence
  Synthetic
agucgucagugaagacuuacc

SEQ ID NO: 5764 - RNA, 21 nt, Artificial Sequence
  Synthetic
agucuucacugacgacucuuc

SEQ ID NO: 5765 - RNA, 21 nt, Artificial Sequence
  Synthetic
augacgaagagucgucaguga

SEQ ID NO: 5766 - RNA, 21 nt, Artificial Sequence
  Synthetic
caccaugacgaagagucguca

SEQ ID NO: 5767 - RNA, 21 nt, Artificial Sequence
  Synthetic
cacugacgacucuucgucaug

SEQ ID NO: 5768 - RNA, 21 nt, Artificial Sequence
  Synthetic
caugacgaagagucgucagug

SEQ ID NO: 5769 - RNA, 21 nt, Artificial Sequence
  Synthetic
ccaugacgaagagucgucagu

SEQ ID NO: 5770 - RNA, 21 nt, Artificial Sequence
  Synthetic
ccugguaagucuucacugacg

SEQ ID NO: 5771 - RNA, 21 nt, Artificial Sequence
  Synthetic
cgaagagucgucagugaagac

SEQ ID NO: 5772 - RNA, 21 nt, Artificial Sequence
  Synthetic
cgacucuucgucauggugcuc

SEQ ID NO: 5773 - RNA, 21 nt, Artificial Sequence
  Synthetic
cugacgacucuucgucauggu

SEQ ID NO: 5774 - RNA, 21 nt, Artificial Sequence
  Synthetic
cugguaagucuucacugacga

SEQ ID NO: 5775 - RNA, 21 nt, Artificial Sequence
  Synthetic
cuucacugacgacucuucguc

SEQ ID NO: 5776 - RNA, 21 nt, Artificial Sequence
  Synthetic
cuuccugguaagucuucacug

SEQ ID NO: 5777 - RNA, 21 nt, Artificial Sequence
  Synthetic
gaagagucgucagugaagacu

SEQ ID NO: 5778 - RNA, 21 nt, Artificial Sequence
  Synthetic
gacgaagagucgucagugaag

SEQ ID NO: 5779 - RNA, 21 nt, Artificial Sequence
  Synthetic
gacgacucuucgucauggugc

SEQ ID NO: 5780 - RNA, 21 nt, Artificial Sequence
  Synthetic
gagagcaccaugacgaagagu

SEQ ID NO: 5781 - RNA, 21 nt, Artificial Sequence
  Synthetic
gagcaccaugacgaagagucg

SEQ ID NO: 5782 - RNA, 21 nt, Artificial Sequence
  Synthetic
gagucgucagugaagacuuac

SEQ ID NO: 5783 - RNA, 21 nt, Artificial Sequence
  Synthetic
gcaccaugacgaagagucguc

SEQ ID NO: 5784 - RNA, 21 nt, Artificial Sequence
  Synthetic
ggagagcaccaugacgaagag

SEQ ID NO: 5785 - RNA, 21 nt, Artificial Sequence
  Synthetic
gguaagucuucacugacgacu

SEQ ID NO: 5786 - RNA, 21 nt, Artificial Sequence
  Synthetic
guaagucuucacugacgacuc

SEQ ID NO: 5787 - RNA, 21 nt, Artificial Sequence
  Synthetic
gucgucagugaagacuuacca

SEQ ID NO: 5788 - RNA, 21 nt, Artificial Sequence
  Synthetic
gucuucacugacgacucuucg

SEQ ID NO: 5789 - RNA, 21 nt, Artificial Sequence
  Synthetic
guggagagcaccaugacgaag

SEQ ID NO: 5790 - RNA, 21 nt, Artificial Sequence
  Synthetic
uaagucuucacugacgacucu

SEQ ID NO: 5791 - RNA, 21 nt, Artificial Sequence
  Synthetic
ucacugacgacucuucgucau

SEQ ID NO: 5792 - RNA, 21 nt, Artificial Sequence
  Synthetic
uccugguaagucuucacugac

SEQ ID NO: 5793 - RNA, 21 nt, Artificial Sequence
  Synthetic
ucgucagugaagacuuaccag

SEQ ID NO: 5794 - RNA, 21 nt, Artificial Sequence
  Synthetic
ucuucacugacgacucuucgu

SEQ ID NO: 5795 - RNA, 21 nt, Artificial Sequence
  Synthetic
ugacgaagagucgucagugaa

SEQ ID NO: 5796 - RNA, 21 nt, Artificial Sequence
  Synthetic
ugacgacucuucgucauggug

SEQ ID NO: 5797 - RNA, 21 nt, Artificial Sequence
  Synthetic
uggagagcaccaugacgaaga

SEQ ID NO: 5798 - RNA, 21 nt, Artificial Sequence
  Synthetic
ugguaagucuucacugacgac

SEQ ID NO: 5799 - RNA, 21 nt, Artificial Sequence
  Synthetic
uucacugacgacucuucguca

SEQ ID NO: 5800 - RNA, 21 nt, Artificial Sequence
  Synthetic
uuccugguaagucuucacuga

SEQ ID NO: 5801 - RNA, 22 nt, Artificial Sequence
  Synthetic
aagagucgucagugaagacuua

SEQ ID NO: 5802 - RNA, 22 nt, Artificial Sequence
  Synthetic
aagucuucacugacgacucuuc

SEQ ID NO: 5803 - RNA, 22 nt, Artificial Sequence
  Synthetic
accaugacgaagagucgucagu

SEQ ID NO: 5804 - RNA, 22 nt, Artificial Sequence
  Synthetic
acgaagagucgucagugaagac

SEQ ID NO: 5805 - RNA, 22 nt, Artificial Sequence
  Synthetic
acgacucuucgucauggugcuc

SEQ ID NO: 5806 - RNA, 22 nt, Artificial Sequence
  Synthetic
acugacgacucuucgucauggu

SEQ ID NO: 5807 - RNA, 22 nt, Artificial Sequence
  Synthetic
acuuccugguaagucuucacug

SEQ ID NO: 5808 - RNA, 22 nt, Artificial Sequence
  Synthetic
agagcaccaugacgaagagucg

SEQ ID NO: 5809 - RNA, 22 nt, Artificial Sequence
  Synthetic
agagucgucagugaagacuuac

SEQ ID NO: 5810 - RNA, 22 nt, Artificial Sequence
  Synthetic
agcaccaugacgaagagucguc

SEQ ID NO: 5811 - RNA, 22 nt, Artificial Sequence
  Synthetic
agucgucagugaagacuuacca

SEQ ID NO: 5812 - RNA, 22 nt, Artificial Sequence
  Synthetic
agucuucacugacgacucuucg

SEQ ID NO: 5813 - RNA, 22 nt, Artificial Sequence
  Synthetic
aguggagagcaccaugacgaag

SEQ ID NO: 5814 - RNA, 22 nt, Artificial Sequence
  Synthetic
augacgaagagucgucagugaa

SEQ ID NO: 5815 - RNA, 22 nt, Artificial Sequence
  Synthetic
caccaugacgaagagucgucag

SEQ ID NO: 5816 - RNA, 22 nt, Artificial Sequence
  Synthetic
cacugacgacucuucgucaugg

SEQ ID NO: 5817 - RNA, 22 nt, Artificial Sequence
  Synthetic
caugacgaagagucgucaguga

SEQ ID NO: 5818 - RNA, 22 nt, Artificial Sequence
  Synthetic
ccaugacgaagagucgucagug

SEQ ID NO: 5819 - RNA, 22 nt, Artificial Sequence
  Synthetic
ccugguaagucuucacugacga

SEQ ID NO: 5820 - RNA, 22 nt, Artificial Sequence
  Synthetic
cgaagagucgucagugaagacu

SEQ ID NO: 5821 - RNA, 22 nt, Artificial Sequence
  Synthetic
cgacucuucgucauggugcucu

SEQ ID NO: 5822 - RNA, 22 nt, Artificial Sequence
  Synthetic
cugacgacucuucgucauggug

SEQ ID NO: 5823 - RNA, 22 nt, Artificial Sequence
  Synthetic
cugguaagucuucacugacgac

SEQ ID NO: 5824 - RNA, 22 nt, Artificial Sequence
  Synthetic
cuucacugacgacucuucguca

SEQ ID NO: 5825 - RNA, 22 nt, Artificial Sequence
  Synthetic
cuuccugguaagucuucacuga

SEQ ID NO: 5826 - RNA, 22 nt, Artificial Sequence
  Synthetic
gaagagucgucagugaagacuu

SEQ ID NO: 5827 - RNA, 22 nt, Artificial Sequence
  Synthetic
gacgaagagucgucagugaaga

SEQ ID NO: 5828 - RNA, 22 nt, Artificial Sequence
  Synthetic
gacgacucuucgucauggugcu

SEQ ID NO: 5829 - RNA, 22 nt, Artificial Sequence
  Synthetic
gagagcaccaugacgaagaguc

SEQ ID NO: 5830 - RNA, 22 nt, Artificial Sequence
  Synthetic
gagcaccaugacgaagagucgu

SEQ ID NO: 5831 - RNA, 22 nt, Artificial Sequence
  Synthetic
gagucgucagugaagacuuacc

SEQ ID NO: 5832 - RNA, 22 nt, Artificial Sequence
  Synthetic
gcaccaugacgaagagucguca

SEQ ID NO: 5833 - RNA, 22 nt, Artificial Sequence
  Synthetic
ggagagcaccaugacgaagagu

SEQ ID NO: 5834 - RNA, 22 nt, Artificial Sequence
  Synthetic
gguaagucuucacugacgacuc

SEQ ID NO: 5835 - RNA, 22 nt, Artificial Sequence
  Synthetic
guaagucuucacugacgacucu

SEQ ID NO: 5836 - RNA, 22 nt, Artificial Sequence
  Synthetic
gucgucagugaagacuuaccag

SEQ ID NO: 5837 - RNA, 22 nt, Artificial Sequence
  Synthetic
gucuucacugacgacucuucgu

SEQ ID NO: 5838 - RNA, 22 nt, Artificial Sequence
  Synthetic
guggagagcaccaugacgaaga

SEQ ID NO: 5839 - RNA, 22 nt, Artificial Sequence
  Synthetic
uaagucuucacugacgacucuu

SEQ ID NO: 5840 - RNA, 22 nt, Artificial Sequence
  Synthetic
uacuuccugguaagucuucacu

SEQ ID NO: 5841 - RNA, 22 nt, Artificial Sequence
  Synthetic
ucacugacgacucuucgucaug

SEQ ID NO: 5842 - RNA, 22 nt, Artificial Sequence
  Synthetic
uccugguaagucuucacugacg

SEQ ID NO: 5843 - RNA, 22 nt, Artificial Sequence
  Synthetic
ucgucagugaagacuuaccagg

SEQ ID NO: 5844 - RNA, 22 nt, Artificial Sequence
  Synthetic
ucuucacugacgacucuucguc

SEQ ID NO: 5845 - RNA, 22 nt, Artificial Sequence
  Synthetic
ugacgaagagucgucagugaag

SEQ ID NO: 5846 - RNA, 22 nt, Artificial Sequence
  Synthetic
ugacgacucuucgucauggugc

SEQ ID NO: 5847 - RNA, 22 nt, Artificial Sequence
  Synthetic
uggagagcaccaugacgaagag

SEQ ID NO: 5848 - RNA, 22 nt, Artificial Sequence
  Synthetic
ugguaagucuucacugacgacu

SEQ ID NO: 5849 - RNA, 22 nt, Artificial Sequence
  Synthetic
uucacugacgacucuucgucau

SEQ ID NO: 5850 - RNA, 22 nt, Artificial Sequence
  Synthetic
uuccugguaagucuucacugac

SEQ ID NO: 5851 - RNA, 20 nt, Artificial Sequence
  Synthetic
aagucuucacugaccacucu

SEQ ID NO: 5852 - RNA, 20 nt, Artificial Sequence
  Synthetic
acaaagaguggucagugaag

SEQ ID NO: 5853 - RNA, 20 nt, Artificial Sequence
  Synthetic
accacucuuugucauggugc

SEQ ID NO: 5854 - RNA, 20 nt, Artificial Sequence
  Synthetic
accaugacaaagagugguca

SEQ ID NO: 5855 - RNA, 20 nt, Artificial Sequence
  Synthetic
acucuuugucauggugcucu

SEQ ID NO: 5856 - RNA, 20 nt, Artificial Sequence
  Synthetic
acugaccacucuuugucaug

SEQ ID NO: 5857 - RNA, 20 nt, Artificial Sequence
  Synthetic
agagcaccaugacaaagagu

SEQ ID NO: 5858 - RNA, 20 nt, Artificial Sequence
  Synthetic
agcaccaugacaaagagugg

SEQ ID NO: 5859 - RNA, 20 nt, Artificial Sequence
  Synthetic
agcucaguggagagcaccau

SEQ ID NO: 5860 - RNA, 20 nt, Artificial Sequence
  Synthetic
agucuucacugaccacucuu

SEQ ID NO: 5861 - RNA, 20 nt, Artificial Sequence
  Synthetic
aguggagagcaccaugacaa

SEQ ID NO: 5862 - RNA, 20 nt, Artificial Sequence
  Synthetic
augacaaagaguggucagug

SEQ ID NO: 5863 - RNA, 20 nt, Artificial Sequence
  Synthetic
caaagaguggucagugaaga

SEQ ID NO: 5864 - RNA, 20 nt, Artificial Sequence
  Synthetic
caccaugacaaagagugguc

SEQ ID NO: 5865 - RNA, 20 nt, Artificial Sequence
  Synthetic
cacucuuugucauggugcuc

SEQ ID NO: 5866 - RNA, 20 nt, Artificial Sequence
  Synthetic
cacugaccacucuuugucau

SEQ ID NO: 5867 - RNA, 20 nt, Artificial Sequence
  Synthetic
caguggagagcaccaugaca

SEQ ID NO: 5868 - RNA, 20 nt, Artificial Sequence
  Synthetic
caugacaaagaguggucagu

SEQ ID NO: 5869 - RNA, 20 nt, Artificial Sequence
  Synthetic
ccacucuuugucauggugcu

SEQ ID NO: 5870 - RNA, 20 nt, Artificial Sequence
  Synthetic
ccaugacaaagaguggucag

SEQ ID NO: 5871 - RNA, 20 nt, Artificial Sequence
  Synthetic
cucaguggagagcaccauga

SEQ ID NO: 5872 - RNA, 20 nt, Artificial Sequence
  Synthetic
cucuuugucauggugcucuc

SEQ ID NO: 5873 - RNA, 20 nt, Artificial Sequence
  Synthetic
cugaccacucuuugucaugg

SEQ ID NO: 5874 - RNA, 20 nt, Artificial Sequence
  Synthetic
cuucacugaccacucuuugu

SEQ ID NO: 5875 - RNA, 20 nt, Artificial Sequence
  Synthetic
cuuugucauggugcucucca

SEQ ID NO: 5876 - RNA, 20 nt, Artificial Sequence
  Synthetic
gacaaagaguggucagugaa

SEQ ID NO: 5877 - RNA, 20 nt, Artificial Sequence
  Synthetic
gaccacucuuugucauggug

SEQ ID NO: 5878 - RNA, 20 nt, Artificial Sequence
  Synthetic
gagagcaccaugacaaagag

SEQ ID NO: 5879 - RNA, 20 nt, Artificial Sequence
  Synthetic
gagcaccaugacaaagagug

SEQ ID NO: 5880 - RNA, 20 nt, Artificial Sequence
  Synthetic
gcaccaugacaaagaguggu

SEQ ID NO: 5881 - RNA, 20 nt, Artificial Sequence
  Synthetic
gcucaguggagagcaccaug

SEQ ID NO: 5882 - RNA, 20 nt, Artificial Sequence
  Synthetic
ggagagcaccaugacaaaga

SEQ ID NO: 5883 - RNA, 20 nt, Artificial Sequence
  Synthetic
guaagucuucacugaccacu

SEQ ID NO: 5884 - RNA, 20 nt, Artificial Sequence
  Synthetic
gucuucacugaccacucuuu

SEQ ID NO: 5885 - RNA, 20 nt, Artificial Sequence
  Synthetic
guggagagcaccaugacaaa

SEQ ID NO: 5886 - RNA, 20 nt, Artificial Sequence
  Synthetic
uaagucuucacugaccacuc

SEQ ID NO: 5887 - RNA, 20 nt, Artificial Sequence
  Synthetic
ucacugaccacucuuuguca

SEQ ID NO: 5888 - RNA, 20 nt, Artificial Sequence
  Synthetic
ucaguggagagcaccaugac

SEQ ID NO: 5889 - RNA, 20 nt, Artificial Sequence
  Synthetic
ucuucacugaccacucuuug

SEQ ID NO: 5890 - RNA, 20 nt, Artificial Sequence
  Synthetic
ucuuugucauggugcucucc

SEQ ID NO: 5891 - RNA, 20 nt, Artificial Sequence
  Synthetic
ugacaaagaguggucaguga

SEQ ID NO: 5892 - RNA, 20 nt, Artificial Sequence
  Synthetic
ugaccacucuuugucauggu

SEQ ID NO: 5893 - RNA, 20 nt, Artificial Sequence
  Synthetic
uggagagcaccaugacaaag

SEQ ID NO: 5894 - RNA, 20 nt, Artificial Sequence
  Synthetic
uucacugaccacucuuuguc

SEQ ID NO: 5895 - RNA, 20 nt, Artificial Sequence
  Synthetic
uugucauggugcucuccacu

SEQ ID NO: 5896 - RNA, 20 nt, Artificial Sequence
  Synthetic
uuugucauggugcucuccac

SEQ ID NO: 5897 - RNA, 21 nt, Artificial Sequence
  Synthetic
aagucuucacugaccacucuu

SEQ ID NO: 5898 - RNA, 21 nt, Artificial Sequence
  Synthetic
acaaagaguggucagugaaga

SEQ ID NO: 5899 - RNA, 21 nt, Artificial Sequence
  Synthetic
accacucuuugucauggugcu

SEQ ID NO: 5900 - RNA, 21 nt, Artificial Sequence
  Synthetic
accaugacaaagaguggucag

SEQ ID NO: 5901 - RNA, 21 nt, Artificial Sequence
  Synthetic
acucuuugucauggugcucuc

SEQ ID NO: 5902 - RNA, 21 nt, Artificial Sequence
  Synthetic
acugaccacucuuugucaugg

SEQ ID NO: 5903 - RNA, 21 nt, Artificial Sequence
  Synthetic
agagcaccaugacaaagagug

SEQ ID NO: 5904 - RNA, 21 nt, Artificial Sequence
  Synthetic
agcaccaugacaaagaguggu

SEQ ID NO: 5905 - RNA, 21 nt, Artificial Sequence
  Synthetic
agcucaguggagagcaccaug

SEQ ID NO: 5906 - RNA, 21 nt, Artificial Sequence
  Synthetic
agucuucacugaccacucuuu

SEQ ID NO: 5907 - RNA, 21 nt, Artificial Sequence
  Synthetic
aguggagagcaccaugacaaa

SEQ ID NO: 5908 - RNA, 21 nt, Artificial Sequence
  Synthetic
augacaaagaguggucaguga

SEQ ID NO: 5909 - RNA, 21 nt, Artificial Sequence
  Synthetic
caaagaguggucagugaagac

SEQ ID NO: 5910 - RNA, 21 nt, Artificial Sequence
  Synthetic
caccaugacaaagagugguca

SEQ ID NO: 5911 - RNA, 21 nt, Artificial Sequence
  Synthetic
cacucuuugucauggugcucu

SEQ ID NO: 5912 - RNA, 21 nt, Artificial Sequence
  Synthetic
cacugaccacucuuugucaug

SEQ ID NO: 5913 - RNA, 21 nt, Artificial Sequence
  Synthetic
caguggagagcaccaugacaa

SEQ ID NO: 5914 - RNA, 21 nt, Artificial Sequence
  Synthetic
caugacaaagaguggucagug

SEQ ID NO: 5915 - RNA, 21 nt, Artificial Sequence
  Synthetic
ccacucuuugucauggugcuc

SEQ ID NO: 5916 - RNA, 21 nt, Artificial Sequence
  Synthetic
ccaugacaaagaguggucagu

SEQ ID NO: 5917 - RNA, 21 nt, Artificial Sequence
  Synthetic
cucaguggagagcaccaugac

SEQ ID NO: 5918 - RNA, 21 nt, Artificial Sequence
  Synthetic
cucuuugucauggugcucucc

SEQ ID NO: 5919 - RNA, 21 nt, Artificial Sequence
  Synthetic
cugaccacucuuugucauggu

SEQ ID NO: 5920 - RNA, 21 nt, Artificial Sequence
  Synthetic
cuucacugaccacucuuuguc

SEQ ID NO: 5921 - RNA, 21 nt, Artificial Sequence
  Synthetic
cuuugucauggugcucuccac

SEQ ID NO: 5922 - RNA, 21 nt, Artificial Sequence
  Synthetic
gacaaagaguggucagugaag

SEQ ID NO: 5923 - RNA, 21 nt, Artificial Sequence
  Synthetic
gaccacucuuugucauggugc

SEQ ID NO: 5924 - RNA, 21 nt, Artificial Sequence
  Synthetic
gagagcaccaugacaaagagu

SEQ ID NO: 5925 - RNA, 21 nt, Artificial Sequence
  Synthetic
gagcaccaugacaaagagugg

SEQ ID NO: 5926 - RNA, 21 nt, Artificial Sequence
  Synthetic
gagcucaguggagagcaccau

SEQ ID NO: 5927 - RNA, 21 nt, Artificial Sequence
  Synthetic
gcaccaugacaaagagugguc

SEQ ID NO: 5928 - RNA, 21 nt, Artificial Sequence
  Synthetic
gcucaguggagagcaccauga

SEQ ID NO: 5929 - RNA, 21 nt, Artificial Sequence
  Synthetic
ggagagcaccaugacaaagag

SEQ ID NO: 5930 - RNA, 21 nt, Artificial Sequence
  Synthetic
gguaagucuucacugaccacu

SEQ ID NO: 5931 - RNA, 21 nt, Artificial Sequence
  Synthetic
guaagucuucacugaccacuc

SEQ ID NO: 5932 - RNA, 21 nt, Artificial Sequence
  Synthetic
gucuucacugaccacucuuug

SEQ ID NO: 5933 - RNA, 21 nt, Artificial Sequence
  Synthetic
guggagagcaccaugacaaag

SEQ ID NO: 5934 - RNA, 21 nt, Artificial Sequence
  Synthetic
uaagucuucacugaccacucu

SEQ ID NO: 5935 - RNA, 21 nt, Artificial Sequence
  Synthetic
ucacugaccacucuuugucau

SEQ ID NO: 5936 - RNA, 21 nt, Artificial Sequence
  Synthetic
ucaguggagagcaccaugaca

SEQ ID NO: 5937 - RNA, 21 nt, Artificial Sequence
  Synthetic
ucuucacugaccacucuuugu

SEQ ID NO: 5938 - RNA, 21 nt, Artificial Sequence
  Synthetic
ucuuugucauggugcucucca

SEQ ID NO: 5939 - RNA, 21 nt, Artificial Sequence
  Synthetic
ugacaaagaguggucagugaa

SEQ ID NO: 5940 - RNA, 21 nt, Artificial Sequence
  Synthetic
ugaccacucuuugucauggug

SEQ ID NO: 5941 - RNA, 21 nt, Artificial Sequence
  Synthetic
uggagagcaccaugacaaaga

SEQ ID NO: 5942 - RNA, 21 nt, Artificial Sequence
  Synthetic
uucacugaccacucuuuguca

SEQ ID NO: 5943 - RNA, 21 nt, Artificial Sequence
  Synthetic
uugucauggugcucuccacug

SEQ ID NO: 5944 - RNA, 21 nt, Artificial Sequence
  Synthetic
uuugucauggugcucuccacu

SEQ ID NO: 5945 - RNA, 22 nt, Artificial Sequence
  Synthetic
aagucuucacugaccacucuuu

SEQ ID NO: 5946 - RNA, 22 nt, Artificial Sequence
  Synthetic
acaaagaguggucagugaagac

SEQ ID NO: 5947 - RNA, 22 nt, Artificial Sequence
  Synthetic
accacucuuugucauggugcuc

SEQ ID NO: 5948 - RNA, 22 nt, Artificial Sequence
  Synthetic
accaugacaaagaguggucagu

SEQ ID NO: 5949 - RNA, 22 nt, Artificial Sequence
  Synthetic
acucuuugucauggugcucucc

SEQ ID NO: 5950 - RNA, 22 nt, Artificial Sequence
  Synthetic
acugaccacucuuugucauggu

SEQ ID NO: 5951 - RNA, 22 nt, Artificial Sequence
  Synthetic
agagcaccaugacaaagagugg

SEQ ID NO: 5952 - RNA, 22 nt, Artificial Sequence
  Synthetic
agcaccaugacaaagagugguc

SEQ ID NO: 5953 - RNA, 22 nt, Artificial Sequence
  Synthetic
agcucaguggagagcaccauga

SEQ ID NO: 5954 - RNA, 22 nt, Artificial Sequence
  Synthetic
agucuucacugaccacucuuug

SEQ ID NO: 5955 - RNA, 22 nt, Artificial Sequence
  Synthetic
aguggagagcaccaugacaaag

SEQ ID NO: 5956 - RNA, 22 nt, Artificial Sequence
  Synthetic
augacaaagaguggucagugaa

SEQ ID NO: 5957 - RNA, 22 nt, Artificial Sequence
  Synthetic
caaagaguggucagugaagacu

SEQ ID NO: 5958 - RNA, 22 nt, Artificial Sequence
  Synthetic
caccaugacaaagaguggucag

SEQ ID NO: 5959 - RNA, 22 nt, Artificial Sequence
  Synthetic
cacucuuugucauggugcucuc

SEQ ID NO: 5960 - RNA, 22 nt, Artificial Sequence
  Synthetic
cacugaccacucuuugucaugg

SEQ ID NO: 5961 - RNA, 22 nt, Artificial Sequence
  Synthetic
caguggagagcaccaugacaaa

SEQ ID NO: 5962 - RNA, 22 nt, Artificial Sequence
  Synthetic
caugacaaagaguggucaguga

SEQ ID NO: 5963 - RNA, 22 nt, Artificial Sequence
  Synthetic
ccacucuuugucauggugcucu

SEQ ID NO: 5964 - RNA, 22 nt, Artificial Sequence
  Synthetic
ccaugacaaagaguggucagug

SEQ ID NO: 5965 - RNA, 22 nt, Artificial Sequence
  Synthetic
cucaguggagagcaccaugaca

SEQ ID NO: 5966 - RNA, 22 nt, Artificial Sequence
  Synthetic
cucuuugucauggugcucucca

SEQ ID NO: 5967 - RNA, 22 nt, Artificial Sequence
  Synthetic
cugaccacucuuugucauggug

SEQ ID NO: 5968 - RNA, 22 nt, Artificial Sequence
  Synthetic
cuucacugaccacucuuuguca

SEQ ID NO: 5969 - RNA, 22 nt, Artificial Sequence
  Synthetic
cuuugucauggugcucuccacu

SEQ ID NO: 5970 - RNA, 22 nt, Artificial Sequence
  Synthetic
gacaaagaguggucagugaaga

SEQ ID NO: 5971 - RNA, 22 nt, Artificial Sequence
  Synthetic
gaccacucuuugucauggugcu

SEQ ID NO: 5972 - RNA, 22 nt, Artificial Sequence
  Synthetic
gagagcaccaugacaaagagug

SEQ ID NO: 5973 - RNA, 22 nt, Artificial Sequence
  Synthetic
gagcaccaugacaaagaguggu

SEQ ID NO: 5974 - RNA, 22 nt, Artificial Sequence
  Synthetic
gagcucaguggagagcaccaug

SEQ ID NO: 5975 - RNA, 22 nt, Artificial Sequence
  Synthetic
gcaccaugacaaagagugguca

SEQ ID NO: 5976 - RNA, 22 nt, Artificial Sequence
  Synthetic
gcucaguggagagcaccaugac

SEQ ID NO: 5977 - RNA, 22 nt, Artificial Sequence
  Synthetic
ggagagcaccaugacaaagagu

SEQ ID NO: 5978 - RNA, 22 nt, Artificial Sequence
  Synthetic
gguaagucuucacugaccacuc

SEQ ID NO: 5979 - RNA, 22 nt, Artificial Sequence
  Synthetic
guaagucuucacugaccacucu

SEQ ID NO: 5980 - RNA, 22 nt, Artificial Sequence
  Synthetic
gucuucacugaccacucuuugu

SEQ ID NO: 5981 - RNA, 22 nt, Artificial Sequence
  Synthetic
guggagagcaccaugacaaaga

SEQ ID NO: 5982 - RNA, 22 nt, Artificial Sequence
  Synthetic
uaagucuucacugaccacucuu

SEQ ID NO: 5983 - RNA, 22 nt, Artificial Sequence
  Synthetic
ucacugaccacucuuugucaug

SEQ ID NO: 5984 - RNA, 22 nt, Artificial Sequence
  Synthetic
ucaguggagagcaccaugacaa

SEQ ID NO: 5985 - RNA, 22 nt, Artificial Sequence
  Synthetic
ucuucacugaccacucuuuguc

SEQ ID NO: 5986 - RNA, 22 nt, Artificial Sequence
  Synthetic
ucuuugucauggugcucuccac

SEQ ID NO: 5987 - RNA, 22 nt, Artificial Sequence
  Synthetic
ugacaaagaguggucagugaag

SEQ ID NO: 5988 - RNA, 22 nt, Artificial Sequence
  Synthetic
ugaccacucuuugucauggugc

SEQ ID NO: 5989 - RNA, 22 nt, Artificial Sequence
  Synthetic
ugagcucaguggagagcaccau

SEQ ID NO: 5990 - RNA, 22 nt, Artificial Sequence
  Synthetic
uggagagcaccaugacaaagag

SEQ ID NO: 5991 - RNA, 22 nt, Artificial Sequence
  Synthetic
ugguaagucuucacugaccacu

SEQ ID NO: 5992 - RNA, 22 nt, Artificial Sequence
  Synthetic
uucacugaccacucuuugucau

SEQ ID NO: 5993 - RNA, 22 nt, Artificial Sequence
  Synthetic
uugucauggugcucuccacuga

SEQ ID NO: 5994 - RNA, 22 nt, Artificial Sequence
  Synthetic
uuugucauggugcucuccacug

SEQ ID NO: 5995 - RNA, 20 nt, Artificial Sequence
  Synthetic
accacucuucgggauggugc

SEQ ID NO: 5996 - RNA, 20 nt, Artificial Sequence
  Synthetic
accaucccgaagagugguca

SEQ ID NO: 5997 - RNA, 20 nt, Artificial Sequence
  Synthetic
acucuucgggauggugcucu

SEQ ID NO: 5998 - RNA, 20 nt, Artificial Sequence
  Synthetic
acugaccacucuucgggaug

SEQ ID NO: 5999 - RNA, 20 nt, Artificial Sequence
  Synthetic
agagcaccaucccgaagagu

SEQ ID NO: 6000 - RNA, 20 nt, Artificial Sequence
  Synthetic
agcaccaucccgaagagugg

SEQ ID NO: 6001 - RNA, 20 nt, Artificial Sequence
  Synthetic
aguggagagcaccaucccga

SEQ ID NO: 6002 - RNA, 20 nt, Artificial Sequence
  Synthetic
aucccgaagaguggucagug

SEQ ID NO: 6003 - RNA, 20 nt, Artificial Sequence
  Synthetic
caccaucccgaagagugguc

SEQ ID NO: 6004 - RNA, 20 nt, Artificial Sequence
  Synthetic
cacucuucgggauggugcuc

SEQ ID NO: 6005 - RNA, 20 nt, Artificial Sequence
  Synthetic
cacugaccacucuucgggau

SEQ ID NO: 6006 - RNA, 20 nt, Artificial Sequence
  Synthetic
caguggagagcaccaucccg

SEQ ID NO: 6007 - RNA, 20 nt, Artificial Sequence
  Synthetic
caucccgaagaguggucagu

SEQ ID NO: 6008 - RNA, 20 nt, Artificial Sequence
  Synthetic
ccacucuucgggauggugcu

SEQ ID NO: 6009 - RNA, 20 nt, Artificial Sequence
  Synthetic
ccaucccgaagaguggucag

SEQ ID NO: 6010 - RNA, 20 nt, Artificial Sequence
  Synthetic
cccgaagaguggucagugaa

SEQ ID NO: 6011 - RNA, 20 nt, Artificial Sequence
  Synthetic
ccgaagaguggucagugaag

SEQ ID NO: 6012 - RNA, 20 nt, Artificial Sequence
  Synthetic
cgggauggugcucuccacug

SEQ ID NO: 6013 - RNA, 20 nt, Artificial Sequence
  Synthetic
cucaguggagagcaccaucc

SEQ ID NO: 6014 - RNA, 20 nt, Artificial Sequence
  Synthetic
cucuucgggauggugcucuc

SEQ ID NO: 6015 - RNA, 20 nt, Artificial Sequence
  Synthetic
cugaccacucuucgggaugg

SEQ ID NO: 6016 - RNA, 20 nt, Artificial Sequence
  Synthetic
cuucacugaccacucuucgg

SEQ ID NO: 6017 - RNA, 20 nt, Artificial Sequence
  Synthetic
cuucgggauggugcucucca

SEQ ID NO: 6018 - RNA, 20 nt, Artificial Sequence
  Synthetic
gaccacucuucgggauggug

SEQ ID NO: 6019 - RNA, 20 nt, Artificial Sequence
  Synthetic
gagagcaccaucccgaagag

SEQ ID NO: 6020 - RNA, 20 nt, Artificial Sequence
  Synthetic
gagcaccaucccgaagagug

SEQ ID NO: 6021 - RNA, 20 nt, Artificial Sequence
  Synthetic
gagcucaguggagagcacca

SEQ ID NO: 6022 - RNA, 20 nt, Artificial Sequence
  Synthetic
gcaccaucccgaagaguggu

SEQ ID NO: 6023 - RNA, 20 nt, Artificial Sequence
  Synthetic
gcucaguggagagcaccauc

SEQ ID NO: 6024 - RNA, 20 nt, Artificial Sequence
  Synthetic
ggagagcaccaucccgaaga

SEQ ID NO: 6025 - RNA, 20 nt, Artificial Sequence
  Synthetic
gucuucacugaccacucuuc

SEQ ID NO: 6026 - RNA, 20 nt, Artificial Sequence
  Synthetic
guggagagcaccaucccgaa

SEQ ID NO: 6027 - RNA, 20 nt, Artificial Sequence
  Synthetic
ucacugaccacucuucggga

SEQ ID NO: 6028 - RNA, 20 nt, Artificial Sequence
  Synthetic
ucaguggagagcaccauccc

SEQ ID NO: 6029 - RNA, 20 nt, Artificial Sequence
  Synthetic
ucccgaagaguggucaguga

SEQ ID NO: 6030 - RNA, 20 nt, Artificial Sequence
  Synthetic
ucgggauggugcucuccacu

SEQ ID NO: 6031 - RNA, 20 nt, Artificial Sequence
  Synthetic
ucuucacugaccacucuucg

SEQ ID NO: 6032 - RNA, 20 nt, Artificial Sequence
  Synthetic
ucuucgggauggugcucucc

SEQ ID NO: 6033 - RNA, 20 nt, Artificial Sequence
  Synthetic
ugaccacucuucgggauggu

SEQ ID NO: 6034 - RNA, 20 nt, Artificial Sequence
  Synthetic
uggagagcaccaucccgaag

SEQ ID NO: 6035 - RNA, 20 nt, Artificial Sequence
  Synthetic
uucacugaccacucuucggg

SEQ ID NO: 6036 - RNA, 20 nt, Artificial Sequence
  Synthetic
uucgggauggugcucuccac

SEQ ID NO: 6037 - RNA, 21 nt, Artificial Sequence
  Synthetic
accacucuucgggauggugcu

SEQ ID NO: 6038 - RNA, 21 nt, Artificial Sequence
  Synthetic
accaucccgaagaguggucag

SEQ ID NO: 6039 - RNA, 21 nt, Artificial Sequence
  Synthetic
acucuucgggauggugcucuc

SEQ ID NO: 6040 - RNA, 21 nt, Artificial Sequence
  Synthetic
acugaccacucuucgggaugg

SEQ ID NO: 6041 - RNA, 21 nt, Artificial Sequence
  Synthetic
agagcaccaucccgaagagug

SEQ ID NO: 6042 - RNA, 21 nt, Artificial Sequence
  Synthetic
agcaccaucccgaagaguggu

SEQ ID NO: 6043 - RNA, 21 nt, Artificial Sequence
  Synthetic
agcucaguggagagcaccauc

SEQ ID NO: 6044 - RNA, 21 nt, Artificial Sequence
  Synthetic
agucuucacugaccacucuuc

SEQ ID NO: 6045 - RNA, 21 nt, Artificial Sequence
  Synthetic
aguggagagcaccaucccgaa

SEQ ID NO: 6046 - RNA, 21 nt, Artificial Sequence
  Synthetic
aucccgaagaguggucaguga

SEQ ID NO: 6047 - RNA, 21 nt, Artificial Sequence
  Synthetic
caccaucccgaagagugguca

SEQ ID NO: 6048 - RNA, 21 nt, Artificial Sequence
  Synthetic
cacucuucgggauggugcucu

SEQ ID NO: 6049 - RNA, 21 nt, Artificial Sequence
  Synthetic
cacugaccacucuucgggaug

SEQ ID NO: 6050 - RNA, 21 nt, Artificial Sequence
  Synthetic
caguggagagcaccaucccga

SEQ ID NO: 6051 - RNA, 21 nt, Artificial Sequence
  Synthetic
caucccgaagaguggucagug

SEQ ID NO: 6052 - RNA, 21 nt, Artificial Sequence
  Synthetic
ccacucuucgggauggugcuc

SEQ ID NO: 6053 - RNA, 21 nt, Artificial Sequence
  Synthetic
ccaucccgaagaguggucagu

SEQ ID NO: 6054 - RNA, 21 nt, Artificial Sequence
  Synthetic
cccgaagaguggucagugaag

SEQ ID NO: 6055 - RNA, 21 nt, Artificial Sequence
  Synthetic
ccgaagaguggucagugaaga

SEQ ID NO: 6056 - RNA, 21 nt, Artificial Sequence
  Synthetic
cgggauggugcucuccacuga

SEQ ID NO: 6057 - RNA, 21 nt, Artificial Sequence
  Synthetic
cucaguggagagcaccauccc

SEQ ID NO: 6058 - RNA, 21 nt, Artificial Sequence
  Synthetic
cucuucgggauggugcucucc

SEQ ID NO: 6059 - RNA, 21 nt, Artificial Sequence
  Synthetic
cugaccacucuucgggauggu

SEQ ID NO: 6060 - RNA, 21 nt, Artificial Sequence
  Synthetic
cuucacugaccacucuucggg

SEQ ID NO: 6061 - RNA, 21 nt, Artificial Sequence
  Synthetic
cuucgggauggugcucuccac

SEQ ID NO: 6062 - RNA, 21 nt, Artificial Sequence
  Synthetic
gaccacucuucgggauggugc

SEQ ID NO: 6063 - RNA, 21 nt, Artificial Sequence
  Synthetic
gagagcaccaucccgaagagu

SEQ ID NO: 6064 - RNA, 21 nt, Artificial Sequence
  Synthetic
gagcaccaucccgaagagugg

SEQ ID NO: 6065 - RNA, 21 nt, Artificial Sequence
  Synthetic
gcaccaucccgaagagugguc

SEQ ID NO: 6066 - RNA, 21 nt, Artificial Sequence
  Synthetic
gcucaguggagagcaccaucc

SEQ ID NO: 6067 - RNA, 21 nt, Artificial Sequence
  Synthetic
ggagagcaccaucccgaagag

SEQ ID NO: 6068 - RNA, 21 nt, Artificial Sequence
  Synthetic
gucuucacugaccacucuucg

SEQ ID NO: 6069 - RNA, 21 nt, Artificial Sequence
  Synthetic
guggagagcaccaucccgaag

SEQ ID NO: 6070 - RNA, 21 nt, Artificial Sequence
  Synthetic
ucacugaccacucuucgggau

SEQ ID NO: 6071 - RNA, 21 nt, Artificial Sequence
  Synthetic
ucaguggagagcaccaucccg

SEQ ID NO: 6072 - RNA, 21 nt, Artificial Sequence
  Synthetic
ucccgaagaguggucagugaa

SEQ ID NO: 6073 - RNA, 21 nt, Artificial Sequence
  Synthetic
ucgggauggugcucuccacug

SEQ ID NO: 6074 - RNA, 21 nt, Artificial Sequence
  Synthetic
ucuucacugaccacucuucgg

SEQ ID NO: 6075 - RNA, 21 nt, Artificial Sequence
  Synthetic
ucuucgggauggugcucucca

SEQ ID NO: 6076 - RNA, 21 nt, Artificial Sequence
  Synthetic
ugaccacucuucgggauggug

SEQ ID NO: 6077 - RNA, 21 nt, Artificial Sequence
  Synthetic
ugagcucaguggagagcacca

SEQ ID NO: 6078 - RNA, 21 nt, Artificial Sequence
  Synthetic
uggagagcaccaucccgaaga

SEQ ID NO: 6079 - RNA, 21 nt, Artificial Sequence
  Synthetic
uucacugaccacucuucggga

SEQ ID NO: 6080 - RNA, 21 nt, Artificial Sequence
  Synthetic
uucgggauggugcucuccacu

SEQ ID NO: 6081 - RNA, 22 nt, Artificial Sequence
  Synthetic
aagucuucacugaccacucuuc

SEQ ID NO: 6082 - RNA, 22 nt, Artificial Sequence
  Synthetic
accacucuucgggauggugcuc

SEQ ID NO: 6083 - RNA, 22 nt, Artificial Sequence
  Synthetic
accaucccgaagaguggucagu

SEQ ID NO: 6084 - RNA, 22 nt, Artificial Sequence
  Synthetic
acucuucgggauggugcucucc

SEQ ID NO: 6085 - RNA, 22 nt, Artificial Sequence
  Synthetic
acugaccacucuucgggauggu

SEQ ID NO: 6086 - RNA, 22 nt, Artificial Sequence
  Synthetic
agagcaccaucccgaagagugg

SEQ ID NO: 6087 - RNA, 22 nt, Artificial Sequence
  Synthetic
agcaccaucccgaagagugguc

SEQ ID NO: 6088 - RNA, 22 nt, Artificial Sequence
  Synthetic
agcucaguggagagcaccaucc

SEQ ID NO: 6089 - RNA, 22 nt, Artificial Sequence
  Synthetic
agucuucacugaccacucuucg

SEQ ID NO: 6090 - RNA, 22 nt, Artificial Sequence
  Synthetic
aguggagagcaccaucccgaag

SEQ ID NO: 6091 - RNA, 22 nt, Artificial Sequence
  Synthetic
aucccgaagaguggucagugaa

SEQ ID NO: 6092 - RNA, 22 nt, Artificial Sequence
  Synthetic
augagcucaguggagagcacca

SEQ ID NO: 6093 - RNA, 22 nt, Artificial Sequence
  Synthetic
caccaucccgaagaguggucag

SEQ ID NO: 6094 - RNA, 22 nt, Artificial Sequence
  Synthetic
cacucuucgggauggugcucuc

SEQ ID NO: 6095 - RNA, 22 nt, Artificial Sequence
  Synthetic
cacugaccacucuucgggaugg

SEQ ID NO: 6096 - RNA, 22 nt, Artificial Sequence
  Synthetic
caguggagagcaccaucccgaa

SEQ ID NO: 6097 - RNA, 22 nt, Artificial Sequence
  Synthetic
caucccgaagaguggucaguga

SEQ ID NO: 6098 - RNA, 22 nt, Artificial Sequence
  Synthetic
ccacucuucgggauggugcucu

SEQ ID NO: 6099 - RNA, 22 nt, Artificial Sequence
  Synthetic
ccaucccgaagaguggucagug

SEQ ID NO: 6100 - RNA, 22 nt, Artificial Sequence
  Synthetic
cccgaagaguggucagugaaga

SEQ ID NO: 6101 - RNA, 22 nt, Artificial Sequence
  Synthetic
ccgaagaguggucagugaagac

SEQ ID NO: 6102 - RNA, 22 nt, Artificial Sequence
  Synthetic
cgggauggugcucuccacugag

SEQ ID NO: 6103 - RNA, 22 nt, Artificial Sequence
  Synthetic
cucaguggagagcaccaucccg

SEQ ID NO: 6104 - RNA, 22 nt, Artificial Sequence
  Synthetic
cucuucgggauggugcucucca

SEQ ID NO: 6105 - RNA, 22 nt, Artificial Sequence
  Synthetic
cugaccacucuucgggauggug

SEQ ID NO: 6106 - RNA, 22 nt, Artificial Sequence
  Synthetic
cuucacugaccacucuucggga

SEQ ID NO: 6107 - RNA, 22 nt, Artificial Sequence
  Synthetic
cuucgggauggugcucuccacu

SEQ ID NO: 6108 - RNA, 22 nt, Artificial Sequence
  Synthetic
gaccacucuucgggauggugcu

SEQ ID NO: 6109 - RNA, 22 nt, Artificial Sequence
  Synthetic
gagagcaccaucccgaagagug

SEQ ID NO: 6110 - RNA, 22 nt, Artificial Sequence
  Synthetic
gagcaccaucccgaagaguggu

SEQ ID NO: 6111 - RNA, 22 nt, Artificial Sequence
  Synthetic
gagcucaguggagagcaccauc

SEQ ID NO: 6112 - RNA, 22 nt, Artificial Sequence
  Synthetic
gcaccaucccgaagagugguca

SEQ ID NO: 6113 - RNA, 22 nt, Artificial Sequence
  Synthetic
gcucaguggagagcaccauccc

SEQ ID NO: 6114 - RNA, 22 nt, Artificial Sequence
  Synthetic
ggagagcaccaucccgaagagu

SEQ ID NO: 6115 - RNA, 22 nt, Artificial Sequence
  Synthetic
gucuucacugaccacucuucgg

SEQ ID NO: 6116 - RNA, 22 nt, Artificial Sequence
  Synthetic
guggagagcaccaucccgaaga

SEQ ID NO: 6117 - RNA, 22 nt, Artificial Sequence
  Synthetic
ucacugaccacucuucgggaug

SEQ ID NO: 6118 - RNA, 22 nt, Artificial Sequence
  Synthetic
ucaguggagagcaccaucccga

SEQ ID NO: 6119 - RNA, 22 nt, Artificial Sequence
  Synthetic
ucccgaagaguggucagugaag

SEQ ID NO: 6120 - RNA, 22 nt, Artificial Sequence
  Synthetic
ucgggauggugcucuccacuga

SEQ ID NO: 6121 - RNA, 22 nt, Artificial Sequence
  Synthetic
ucuucacugaccacucuucggg

SEQ ID NO: 6122 - RNA, 22 nt, Artificial Sequence
  Synthetic
ucuucgggauggugcucuccac

SEQ ID NO: 6123 - RNA, 22 nt, Artificial Sequence
  Synthetic
ugaccacucuucgggauggugc

SEQ ID NO: 6124 - RNA, 22 nt, Artificial Sequence
  Synthetic
uggagagcaccaucccgaagag

SEQ ID NO: 6125 - RNA, 22 nt, Artificial Sequence
  Synthetic
uucacugaccacucuucgggau

SEQ ID NO: 6126 - RNA, 22 nt, Artificial Sequence
  Synthetic
uucgggauggugcucuccacug

SEQ ID NO: 6127 - RNA, 20 nt, Artificial Sequence
  Synthetic
acagagaggagagcugggcu

SEQ ID NO: 6128 - RNA, 20 nt, Artificial Sequence
  Synthetic
acuggcagcagccuggcucu

SEQ ID NO: 6129 - RNA, 20 nt, Artificial Sequence
  Synthetic
agagaggagagcugggcuca

SEQ ID NO: 6130 - RNA, 20 nt, Artificial Sequence
  Synthetic
agagccaggcugcugccagu

SEQ ID NO: 6131 - RNA, 20 nt, Artificial Sequence
  Synthetic
agagcugggcucacuggcag

SEQ ID NO: 6132 - RNA, 20 nt, Artificial Sequence
  Synthetic
agaggagagcugggcucacu

SEQ ID NO: 6133 - RNA, 20 nt, Artificial Sequence
  Synthetic
agaucagagccaggcugcug

SEQ ID NO: 6134 - RNA, 20 nt, Artificial Sequence
  Synthetic
agccaggcugcugccaguga

SEQ ID NO: 6135 - RNA, 20 nt, Artificial Sequence
  Synthetic
agcugggcucacuggcagca

SEQ ID NO: 6136 - RNA, 20 nt, Artificial Sequence
  Synthetic
aggagagcugggcucacugg

SEQ ID NO: 6137 - RNA, 20 nt, Artificial Sequence
  Synthetic
aggcugcugccagugagccc

SEQ ID NO: 6138 - RNA, 20 nt, Artificial Sequence
  Synthetic
aucagagccaggcugcugcc

SEQ ID NO: 6139 - RNA, 20 nt, Artificial Sequence
  Synthetic
cacuggcagcagccuggcuc

SEQ ID NO: 6140 - RNA, 20 nt, Artificial Sequence
  Synthetic
cagagaggagagcugggcuc

SEQ ID NO: 6141 - RNA, 20 nt, Artificial Sequence
  Synthetic
cagagccaggcugcugccag

SEQ ID NO: 6142 - RNA, 20 nt, Artificial Sequence
  Synthetic
caggcugcugccagugagcc

SEQ ID NO: 6143 - RNA, 20 nt, Artificial Sequence
  Synthetic
cagugagcccagcucuccuc

SEQ ID NO: 6144 - RNA, 20 nt, Artificial Sequence
  Synthetic
ccaggcugcugccagugagc

SEQ ID NO: 6145 - RNA, 20 nt, Artificial Sequence
  Synthetic
ccagugagcccagcucuccu

SEQ ID NO: 6146 - RNA, 20 nt, Artificial Sequence
  Synthetic
cucacuggcagcagccuggc

SEQ ID NO: 6147 - RNA, 20 nt, Artificial Sequence
  Synthetic
cugccagugagcccagcucu

SEQ ID NO: 6148 - RNA, 20 nt, Artificial Sequence
  Synthetic
cugcugccagugagcccagc

SEQ ID NO: 6149 - RNA, 20 nt, Artificial Sequence
  Synthetic
cuggcagcagccuggcucug

SEQ ID NO: 6150 - RNA, 20 nt, Artificial Sequence
  Synthetic
cugggcucacuggcagcagc

SEQ ID NO: 6151 - RNA, 20 nt, Artificial Sequence
  Synthetic
gagagcugggcucacuggca

SEQ ID NO: 6152 - RNA, 20 nt, Artificial Sequence
  Synthetic
gagaggagagcugggcucac

SEQ ID NO: 6153 - RNA, 20 nt, Artificial Sequence
  Synthetic
gagaucagagccaggcugcu

SEQ ID NO: 6154 - RNA, 20 nt, Artificial Sequence
  Synthetic
gagccaggcugcugccagug

SEQ ID NO: 6155 - RNA, 20 nt, Artificial Sequence
  Synthetic
gagcugggcucacuggcagc

SEQ ID NO: 6156 - RNA, 20 nt, Artificial Sequence
  Synthetic
gaggagagcugggcucacug

SEQ ID NO: 6157 - RNA, 20 nt, Artificial Sequence
  Synthetic
gaucagagccaggcugcugc

SEQ ID NO: 6158 - RNA, 20 nt, Artificial Sequence
  Synthetic
gccaggcugcugccagugag

SEQ ID NO: 6159 - RNA, 20 nt, Artificial Sequence
  Synthetic
gccagugagcccagcucucc

SEQ ID NO: 6160 - RNA, 20 nt, Artificial Sequence
  Synthetic
gcucacuggcagcagccugg

SEQ ID NO: 6161 - RNA, 20 nt, Artificial Sequence
  Synthetic
gcugccagugagcccagcuc

SEQ ID NO: 6162 - RNA, 20 nt, Artificial Sequence
  Synthetic
gcugcugccagugagcccag

SEQ ID NO: 6163 - RNA, 20 nt, Artificial Sequence
  Synthetic
gcugggcucacuggcagcag

SEQ ID NO: 6164 - RNA, 20 nt, Artificial Sequence
  Synthetic
ggagagcugggcucacuggc

SEQ ID NO: 6165 - RNA, 20 nt, Artificial Sequence
  Synthetic
ggcucacuggcagcagccug

SEQ ID NO: 6166 - RNA, 20 nt, Artificial Sequence
  Synthetic
ggcugcugccagugagccca

SEQ ID NO: 6167 - RNA, 20 nt, Artificial Sequence
  Synthetic
gggcucacuggcagcagccu

SEQ ID NO: 6168 - RNA, 20 nt, Artificial Sequence
  Synthetic
ucacuggcagcagccuggcu

SEQ ID NO: 6169 - RNA, 20 nt, Artificial Sequence
  Synthetic
ucagagccaggcugcugcca

SEQ ID NO: 6170 - RNA, 20 nt, Artificial Sequence
  Synthetic
ugccagugagcccagcucuc

SEQ ID NO: 6171 - RNA, 20 nt, Artificial Sequence
  Synthetic
ugcugccagugagcccagcu

SEQ ID NO: 6172 - RNA, 20 nt, Artificial Sequence
  Synthetic
ugggcucacuggcagcagcc

SEQ ID NO: 6173 - RNA, 21 nt, Artificial Sequence
  Synthetic
aacagagaggagagcugggcu

SEQ ID NO: 6174 - RNA, 21 nt, Artificial Sequence
  Synthetic
acagagaggagagcugggcuc

SEQ ID NO: 6175 - RNA, 21 nt, Artificial Sequence
  Synthetic
acuggcagcagccuggcucug

SEQ ID NO: 6176 - RNA, 21 nt, Artificial Sequence
  Synthetic
agagaggagagcugggcucac

SEQ ID NO: 6177 - RNA, 21 nt, Artificial Sequence
  Synthetic
agagccaggcugcugccagug

SEQ ID NO: 6178 - RNA, 21 nt, Artificial Sequence
  Synthetic
agagcugggcucacuggcagc

SEQ ID NO: 6179 - RNA, 21 nt, Artificial Sequence
  Synthetic
agaggagagcugggcucacug

SEQ ID NO: 6180 - RNA, 21 nt, Artificial Sequence
  Synthetic
agaucagagccaggcugcugc

SEQ ID NO: 6181 - RNA, 21 nt, Artificial Sequence
  Synthetic
agccaggcugcugccagugag

SEQ ID NO: 6182 - RNA, 21 nt, Artificial Sequence
  Synthetic
agcugggcucacuggcagcag

SEQ ID NO: 6183 - RNA, 21 nt, Artificial Sequence
  Synthetic
aggagagcugggcucacuggc

SEQ ID NO: 6184 - RNA, 21 nt, Artificial Sequence
  Synthetic
aggcugcugccagugagccca

SEQ ID NO: 6185 - RNA, 21 nt, Artificial Sequence
  Synthetic
aucagagccaggcugcugcca

SEQ ID NO: 6186 - RNA, 21 nt, Artificial Sequence
  Synthetic
cacuggcagcagccuggcucu

SEQ ID NO: 6187 - RNA, 21 nt, Artificial Sequence
  Synthetic
cagagaggagagcugggcuca

SEQ ID NO: 6188 - RNA, 21 nt, Artificial Sequence
  Synthetic
cagagccaggcugcugccagu

SEQ ID NO: 6189 - RNA, 21 nt, Artificial Sequence
  Synthetic
caggcugcugccagugagccc

SEQ ID NO: 6190 - RNA, 21 nt, Artificial Sequence
  Synthetic
cagugagcccagcucuccucu

SEQ ID NO: 6191 - RNA, 21 nt, Artificial Sequence
  Synthetic
ccaggcugcugccagugagcc

SEQ ID NO: 6192 - RNA, 21 nt, Artificial Sequence
  Synthetic
ccagugagcccagcucuccuc

SEQ ID NO: 6193 - RNA, 21 nt, Artificial Sequence
  Synthetic
cucacuggcagcagccuggcu

SEQ ID NO: 6194 - RNA, 21 nt, Artificial Sequence
  Synthetic
cugccagugagcccagcucuc

SEQ ID NO: 6195 - RNA, 21 nt, Artificial Sequence
  Synthetic
cugcugccagugagcccagcu

SEQ ID NO: 6196 - RNA, 21 nt, Artificial Sequence
  Synthetic
cuggcagcagccuggcucuga

SEQ ID NO: 6197 - RNA, 21 nt, Artificial Sequence
  Synthetic
cugggcucacuggcagcagcc

SEQ ID NO: 6198 - RNA, 21 nt, Artificial Sequence
  Synthetic
gagagcugggcucacuggcag

SEQ ID NO: 6199 - RNA, 21 nt, Artificial Sequence
  Synthetic
gagaggagagcugggcucacu

SEQ ID NO: 6200 - RNA, 21 nt, Artificial Sequence
  Synthetic
gagaucagagccaggcugcug

SEQ ID NO: 6201 - RNA, 21 nt, Artificial Sequence
  Synthetic
gagccaggcugcugccaguga

SEQ ID NO: 6202 - RNA, 21 nt, Artificial Sequence
  Synthetic
gagcugggcucacuggcagca

SEQ ID NO: 6203 - RNA, 21 nt, Artificial Sequence
  Synthetic
gaggagagcugggcucacugg

SEQ ID NO: 6204 - RNA, 21 nt, Artificial Sequence
  Synthetic
gaucagagccaggcugcugcc

SEQ ID NO: 6205 - RNA, 21 nt, Artificial Sequence
  Synthetic
gccaggcugcugccagugagc

SEQ ID NO: 6206 - RNA, 21 nt, Artificial Sequence
  Synthetic
gccagugagcccagcucuccu

SEQ ID NO: 6207 - RNA, 21 nt, Artificial Sequence
  Synthetic
gcucacuggcagcagccuggc

SEQ ID NO: 6208 - RNA, 21 nt, Artificial Sequence
  Synthetic
gcugccagugagcccagcucu

SEQ ID NO: 6209 - RNA, 21 nt, Artificial Sequence
  Synthetic
gcugcugccagugagcccagc

SEQ ID NO: 6210 - RNA, 21 nt, Artificial Sequence
  Synthetic
gcugggcucacuggcagcagc

SEQ ID NO: 6211 - RNA, 21 nt, Artificial Sequence
  Synthetic
ggagagcugggcucacuggca

SEQ ID NO: 6212 - RNA, 21 nt, Artificial Sequence
  Synthetic
ggagaucagagccaggcugcu

SEQ ID NO: 6213 - RNA, 21 nt, Artificial Sequence
  Synthetic
ggcucacuggcagcagccugg

SEQ ID NO: 6214 - RNA, 21 nt, Artificial Sequence
  Synthetic
ggcugcugccagugagcccag

SEQ ID NO: 6215 - RNA, 21 nt, Artificial Sequence
  Synthetic
gggcucacuggcagcagccug

SEQ ID NO: 6216 - RNA, 21 nt, Artificial Sequence
  Synthetic
ucacuggcagcagccuggcuc

SEQ ID NO: 6217 - RNA, 21 nt, Artificial Sequence
  Synthetic
ucagagccaggcugcugccag

SEQ ID NO: 6218 - RNA, 21 nt, Artificial Sequence
  Synthetic
ugccagugagcccagcucucc

SEQ ID NO: 6219 - RNA, 21 nt, Artificial Sequence
  Synthetic
ugcugccagugagcccagcuc

SEQ ID NO: 6220 - RNA, 21 nt, Artificial Sequence
  Synthetic
ugggcucacuggcagcagccu

SEQ ID NO: 6221 - RNA, 22 nt, Artificial Sequence
  Synthetic
aacagagaggagagcugggcuc

SEQ ID NO: 6222 - RNA, 22 nt, Artificial Sequence
  Synthetic
acagagaggagagcugggcuca

SEQ ID NO: 6223 - RNA, 22 nt, Artificial Sequence
  Synthetic
acuggcagcagccuggcucuga

SEQ ID NO: 6224 - RNA, 22 nt, Artificial Sequence
  Synthetic
agagaggagagcugggcucacu

SEQ ID NO: 6225 - RNA, 22 nt, Artificial Sequence
  Synthetic
agagccaggcugcugccaguga

SEQ ID NO: 6226 - RNA, 22 nt, Artificial Sequence
  Synthetic
agagcugggcucacuggcagca

SEQ ID NO: 6227 - RNA, 22 nt, Artificial Sequence
  Synthetic
agaggagagcugggcucacugg

SEQ ID NO: 6228 - RNA, 22 nt, Artificial Sequence
  Synthetic
agaucagagccaggcugcugcc

SEQ ID NO: 6229 - RNA, 22 nt, Artificial Sequence
  Synthetic
agccaggcugcugccagugagc

SEQ ID NO: 6230 - RNA, 22 nt, Artificial Sequence
  Synthetic
agcugggcucacuggcagcagc

SEQ ID NO: 6231 - RNA, 22 nt, Artificial Sequence
  Synthetic
aggagagcugggcucacuggca

SEQ ID NO: 6232 - RNA, 22 nt, Artificial Sequence
  Synthetic
aggcugcugccagugagcccag

SEQ ID NO: 6233 - RNA, 22 nt, Artificial Sequence
  Synthetic
aucagagccaggcugcugccag

SEQ ID NO: 6234 - RNA, 22 nt, Artificial Sequence
  Synthetic
cacuggcagcagccuggcucug

SEQ ID NO: 6235 - RNA, 22 nt, Artificial Sequence
  Synthetic
cagagaggagagcugggcucac

SEQ ID NO: 6236 - RNA, 22 nt, Artificial Sequence
  Synthetic
cagagccaggcugcugccagug

SEQ ID NO: 6237 - RNA, 22 nt, Artificial Sequence
  Synthetic
caggcugcugccagugagccca

SEQ ID NO: 6238 - RNA, 22 nt, Artificial Sequence
  Synthetic
cagugagcccagcucuccucuc

SEQ ID NO: 6239 - RNA, 22 nt, Artificial Sequence
  Synthetic
ccaggcugcugccagugagccc

SEQ ID NO: 6240 - RNA, 22 nt, Artificial Sequence
  Synthetic
ccagugagcccagcucuccucu

SEQ ID NO: 6241 - RNA, 22 nt, Artificial Sequence
  Synthetic
cucacuggcagcagccuggcuc

SEQ ID NO: 6242 - RNA, 22 nt, Artificial Sequence
  Synthetic
cugccagugagcccagcucucc

SEQ ID NO: 6243 - RNA, 22 nt, Artificial Sequence
  Synthetic
cugcugccagugagcccagcuc

SEQ ID NO: 6244 - RNA, 22 nt, Artificial Sequence
  Synthetic
cuggcagcagccuggcucugau

SEQ ID NO: 6245 - RNA, 22 nt, Artificial Sequence
  Synthetic
cugggcucacuggcagcagccu

SEQ ID NO: 6246 - RNA, 22 nt, Artificial Sequence
  Synthetic
gaacagagaggagagcugggcu

SEQ ID NO: 6247 - RNA, 22 nt, Artificial Sequence
  Synthetic
gagagcugggcucacuggcagc

SEQ ID NO: 6248 - RNA, 22 nt, Artificial Sequence
  Synthetic
gagaggagagcugggcucacug

SEQ ID NO: 6249 - RNA, 22 nt, Artificial Sequence
  Synthetic
gagaucagagccaggcugcugc

SEQ ID NO: 6250 - RNA, 22 nt, Artificial Sequence
  Synthetic
gagccaggcugcugccagugag

SEQ ID NO: 6251 - RNA, 22 nt, Artificial Sequence
  Synthetic
gagcugggcucacuggcagcag

SEQ ID NO: 6252 - RNA, 22 nt, Artificial Sequence
  Synthetic
gaggagagcugggcucacuggc

SEQ ID NO: 6253 - RNA, 22 nt, Artificial Sequence
  Synthetic
gaucagagccaggcugcugcca

SEQ ID NO: 6254 - RNA, 22 nt, Artificial Sequence
  Synthetic
gccaggcugcugccagugagcc

SEQ ID NO: 6255 - RNA, 22 nt, Artificial Sequence
  Synthetic
gccagugagcccagcucuccuc

SEQ ID NO: 6256 - RNA, 22 nt, Artificial Sequence
  Synthetic
gcucacuggcagcagccuggcu

SEQ ID NO: 6257 - RNA, 22 nt, Artificial Sequence
  Synthetic
gcugccagugagcccagcucuc

SEQ ID NO: 6258 - RNA, 22 nt, Artificial Sequence
  Synthetic
gcugcugccagugagcccagcu

SEQ ID NO: 6259 - RNA, 22 nt, Artificial Sequence
  Synthetic
gcugggcucacuggcagcagcc

SEQ ID NO: 6260 - RNA, 22 nt, Artificial Sequence
  Synthetic
ggagagcugggcucacuggcag

SEQ ID NO: 6261 - RNA, 22 nt, Artificial Sequence
  Synthetic
ggagaucagagccaggcugcug

SEQ ID NO: 6262 - RNA, 22 nt, Artificial Sequence
  Synthetic
ggcucacuggcagcagccuggc

SEQ ID NO: 6263 - RNA, 22 nt, Artificial Sequence
  Synthetic
ggcugcugccagugagcccagc

SEQ ID NO: 6264 - RNA, 22 nt, Artificial Sequence
  Synthetic
gggcucacuggcagcagccugg

SEQ ID NO: 6265 - RNA, 22 nt, Artificial Sequence
  Synthetic
ucacuggcagcagccuggcucu

SEQ ID NO: 6266 - RNA, 22 nt, Artificial Sequence
  Synthetic
ucagagccaggcugcugccagu

SEQ ID NO: 6267 - RNA, 22 nt, Artificial Sequence
  Synthetic
ugccagugagcccagcucuccu

SEQ ID NO: 6268 - RNA, 22 nt, Artificial Sequence
  Synthetic
ugcugccagugagcccagcucu

SEQ ID NO: 6269 - RNA, 22 nt, Artificial Sequence
  Synthetic
uggagaucagagccaggcugcu

SEQ ID NO: 6270 - RNA, 22 nt, Artificial Sequence
  Synthetic
ugggcucacuggcagcagccug

SEQ ID NO: 6271 - RNA, 20 nt, Artificial Sequence
  Synthetic
accagcagcagccuggcucu

SEQ ID NO: 6272 - RNA, 20 nt, Artificial Sequence
  Synthetic
agagccaggcugcugcuggu

SEQ ID NO: 6273 - RNA, 20 nt, Artificial Sequence
  Synthetic
agagcugggcucaccagcag

SEQ ID NO: 6274 - RNA, 20 nt, Artificial Sequence
  Synthetic
agaggagagcugggcucacc

SEQ ID NO: 6275 - RNA, 20 nt, Artificial Sequence
  Synthetic
agccaggcugcugcugguga

SEQ ID NO: 6276 - RNA, 20 nt, Artificial Sequence
  Synthetic
agcugggcucaccagcagca

SEQ ID NO: 6277 - RNA, 20 nt, Artificial Sequence
  Synthetic
aggagagcugggcucaccag

SEQ ID NO: 6278 - RNA, 20 nt, Artificial Sequence
  Synthetic
aggcugcugcuggugagccc

SEQ ID NO: 6279 - RNA, 20 nt, Artificial Sequence
  Synthetic
aucagagccaggcugcugcu

SEQ ID NO: 6280 - RNA, 20 nt, Artificial Sequence
  Synthetic
caccagcagcagccuggcuc

SEQ ID NO: 6281 - RNA, 20 nt, Artificial Sequence
  Synthetic
cagagccaggcugcugcugg

SEQ ID NO: 6282 - RNA, 20 nt, Artificial Sequence
  Synthetic
cagcagcagccuggcucuga

SEQ ID NO: 6283 - RNA, 20 nt, Artificial Sequence
  Synthetic
caggcugcugcuggugagcc

SEQ ID NO: 6284 - RNA, 20 nt, Artificial Sequence
  Synthetic
ccagcagcagccuggcucug

SEQ ID NO: 6285 - RNA, 20 nt, Artificial Sequence
  Synthetic
ccaggcugcugcuggugagc

SEQ ID NO: 6286 - RNA, 20 nt, Artificial Sequence
  Synthetic
cucaccagcagcagccuggc

SEQ ID NO: 6287 - RNA, 20 nt, Artificial Sequence
  Synthetic
cugcugcuggugagcccagc

SEQ ID NO: 6288 - RNA, 20 nt, Artificial Sequence
  Synthetic
cugcuggugagcccagcucu

SEQ ID NO: 6289 - RNA, 20 nt, Artificial Sequence
  Synthetic
cugggcucaccagcagcagc

SEQ ID NO: 6290 - RNA, 20 nt, Artificial Sequence
  Synthetic
cuggugagcccagcucuccu

SEQ ID NO: 6291 - RNA, 20 nt, Artificial Sequence
  Synthetic
gagagcugggcucaccagca

SEQ ID NO: 6292 - RNA, 20 nt, Artificial Sequence
  Synthetic
gagccaggcugcugcuggug

SEQ ID NO: 6293 - RNA, 20 nt, Artificial Sequence
  Synthetic
gagcugggcucaccagcagc

SEQ ID NO: 6294 - RNA, 20 nt, Artificial Sequence
  Synthetic
gaggagagcugggcucacca

SEQ ID NO: 6295 - RNA, 20 nt, Artificial Sequence
  Synthetic
gccaggcugcugcuggugag

SEQ ID NO: 6296 - RNA, 20 nt, Artificial Sequence
  Synthetic
gcucaccagcagcagccugg

SEQ ID NO: 6297 - RNA, 20 nt, Artificial Sequence
  Synthetic
gcugcugcuggugagcccag

SEQ ID NO: 6298 - RNA, 20 nt, Artificial Sequence
  Synthetic
gcugcuggugagcccagcuc

SEQ ID NO: 6299 - RNA, 20 nt, Artificial Sequence
  Synthetic
gcugggcucaccagcagcag

SEQ ID NO: 6300 - RNA, 20 nt, Artificial Sequence
  Synthetic
gcuggugagcccagcucucc

SEQ ID NO: 6301 - RNA, 20 nt, Artificial Sequence
  Synthetic
ggagagcugggcucaccagc

SEQ ID NO: 6302 - RNA, 20 nt, Artificial Sequence
  Synthetic
ggagaucagagccaggcugc

SEQ ID NO: 6303 - RNA, 20 nt, Artificial Sequence
  Synthetic
ggcucaccagcagcagccug

SEQ ID NO: 6304 - RNA, 20 nt, Artificial Sequence
  Synthetic
ggcugcugcuggugagccca

SEQ ID NO: 6305 - RNA, 20 nt, Artificial Sequence
  Synthetic
gggcucaccagcagcagccu

SEQ ID NO: 6306 - RNA, 20 nt, Artificial Sequence
  Synthetic
ucaccagcagcagccuggcu

SEQ ID NO: 6307 - RNA, 20 nt, Artificial Sequence
  Synthetic
ucagagccaggcugcugcug

SEQ ID NO: 6308 - RNA, 20 nt, Artificial Sequence
  Synthetic
ugcugcuggugagcccagcu

SEQ ID NO: 6309 - RNA, 20 nt, Artificial Sequence
  Synthetic
ugcuggugagcccagcucuc

SEQ ID NO: 6310 - RNA, 20 nt, Artificial Sequence
  Synthetic
ugggcucaccagcagcagcc

SEQ ID NO: 6311 - RNA, 21 nt, Artificial Sequence
  Synthetic
accagcagcagccuggcucug

SEQ ID NO: 6312 - RNA, 21 nt, Artificial Sequence
  Synthetic
agagccaggcugcugcuggug

SEQ ID NO: 6313 - RNA, 21 nt, Artificial Sequence
  Synthetic
agagcugggcucaccagcagc

SEQ ID NO: 6314 - RNA, 21 nt, Artificial Sequence
  Synthetic
agaggagagcugggcucacca

SEQ ID NO: 6315 - RNA, 21 nt, Artificial Sequence
  Synthetic
agccaggcugcugcuggugag

SEQ ID NO: 6316 - RNA, 21 nt, Artificial Sequence
  Synthetic
agcugggcucaccagcagcag

SEQ ID NO: 6317 - RNA, 21 nt, Artificial Sequence
  Synthetic
aggagagcugggcucaccagc

SEQ ID NO: 6318 - RNA, 21 nt, Artificial Sequence
  Synthetic
aggcugcugcuggugagccca

SEQ ID NO: 6319 - RNA, 21 nt, Artificial Sequence
  Synthetic
aucagagccaggcugcugcug

SEQ ID NO: 6320 - RNA, 21 nt, Artificial Sequence
  Synthetic
caccagcagcagccuggcucu

SEQ ID NO: 6321 - RNA, 21 nt, Artificial Sequence
  Synthetic
cagagccaggcugcugcuggu

SEQ ID NO: 6322 - RNA, 21 nt, Artificial Sequence
  Synthetic
cagcagcagccuggcucugau

SEQ ID NO: 6323 - RNA, 21 nt, Artificial Sequence
  Synthetic
caggcugcugcuggugagccc

SEQ ID NO: 6324 - RNA, 21 nt, Artificial Sequence
  Synthetic
ccagcagcagccuggcucuga

SEQ ID NO: 6325 - RNA, 21 nt, Artificial Sequence
  Synthetic
ccaggcugcugcuggugagcc

SEQ ID NO: 6326 - RNA, 21 nt, Artificial Sequence
  Synthetic
cucaccagcagcagccuggcu

SEQ ID NO: 6327 - RNA, 21 nt, Artificial Sequence
  Synthetic
cugcugcuggugagcccagcu

SEQ ID NO: 6328 - RNA, 21 nt, Artificial Sequence
  Synthetic
cugcuggugagcccagcucuc

SEQ ID NO: 6329 - RNA, 21 nt, Artificial Sequence
  Synthetic
cugggcucaccagcagcagcc

SEQ ID NO: 6330 - RNA, 21 nt, Artificial Sequence
  Synthetic
cuggugagcccagcucuccuc

SEQ ID NO: 6331 - RNA, 21 nt, Artificial Sequence
  Synthetic
gagagcugggcucaccagcag

SEQ ID NO: 6332 - RNA, 21 nt, Artificial Sequence
  Synthetic
gagaggagagcugggcucacc

SEQ ID NO: 6333 - RNA, 21 nt, Artificial Sequence
  Synthetic
gagccaggcugcugcugguga

SEQ ID NO: 6334 - RNA, 21 nt, Artificial Sequence
  Synthetic
gagcugggcucaccagcagca

SEQ ID NO: 6335 - RNA, 21 nt, Artificial Sequence
  Synthetic
gaggagagcugggcucaccag

SEQ ID NO: 6336 - RNA, 21 nt, Artificial Sequence
  Synthetic
gaucagagccaggcugcugcu

SEQ ID NO: 6337 - RNA, 21 nt, Artificial Sequence
  Synthetic
gccaggcugcugcuggugagc

SEQ ID NO: 6338 - RNA, 21 nt, Artificial Sequence
  Synthetic
gcucaccagcagcagccuggc

SEQ ID NO: 6339 - RNA, 21 nt, Artificial Sequence
  Synthetic
gcugcugcuggugagcccagc

SEQ ID NO: 6340 - RNA, 21 nt, Artificial Sequence
  Synthetic
gcugcuggugagcccagcucu

SEQ ID NO: 6341 - RNA, 21 nt, Artificial Sequence
  Synthetic
gcugggcucaccagcagcagc

SEQ ID NO: 6342 - RNA, 21 nt, Artificial Sequence
  Synthetic
gcuggugagcccagcucuccu

SEQ ID NO: 6343 - RNA, 21 nt, Artificial Sequence
  Synthetic
ggagagcugggcucaccagca

SEQ ID NO: 6344 - RNA, 21 nt, Artificial Sequence
  Synthetic
ggcucaccagcagcagccugg

SEQ ID NO: 6345 - RNA, 21 nt, Artificial Sequence
  Synthetic
ggcugcugcuggugagcccag

SEQ ID NO: 6346 - RNA, 21 nt, Artificial Sequence
  Synthetic
gggcucaccagcagcagccug

SEQ ID NO: 6347 - RNA, 21 nt, Artificial Sequence
  Synthetic
ucaccagcagcagccuggcuc

SEQ ID NO: 6348 - RNA, 21 nt, Artificial Sequence
  Synthetic
ucagagccaggcugcugcugg

SEQ ID NO: 6349 - RNA, 21 nt, Artificial Sequence
  Synthetic
ugcugcuggugagcccagcuc

SEQ ID NO: 6350 - RNA, 21 nt, Artificial Sequence
  Synthetic
ugcuggugagcccagcucucc

SEQ ID NO: 6351 - RNA, 21 nt, Artificial Sequence
  Synthetic
uggagaucagagccaggcugc

SEQ ID NO: 6352 - RNA, 21 nt, Artificial Sequence
  Synthetic
ugggcucaccagcagcagccu

SEQ ID NO: 6353 - RNA, 22 nt, Artificial Sequence
  Synthetic
accagcagcagccuggcucuga

SEQ ID NO: 6354 - RNA, 22 nt, Artificial Sequence
  Synthetic
agagaggagagcugggcucacc

SEQ ID NO: 6355 - RNA, 22 nt, Artificial Sequence
  Synthetic
agagccaggcugcugcugguga

SEQ ID NO: 6356 - RNA, 22 nt, Artificial Sequence
  Synthetic
agagcugggcucaccagcagca

SEQ ID NO: 6357 - RNA, 22 nt, Artificial Sequence
  Synthetic
agaggagagcugggcucaccag

SEQ ID NO: 6358 - RNA, 22 nt, Artificial Sequence
  Synthetic
agaucagagccaggcugcugcu

SEQ ID NO: 6359 - RNA, 22 nt, Artificial Sequence
  Synthetic
agccaggcugcugcuggugagc

SEQ ID NO: 6360 - RNA, 22 nt, Artificial Sequence
  Synthetic
agcugggcucaccagcagcagc

SEQ ID NO: 6361 - RNA, 22 nt, Artificial Sequence
  Synthetic
aggagagcugggcucaccagca

SEQ ID NO: 6362 - RNA, 22 nt, Artificial Sequence
  Synthetic
aggcugcugcuggugagcccag

SEQ ID NO: 6363 - RNA, 22 nt, Artificial Sequence
  Synthetic
aucagagccaggcugcugcugg

SEQ ID NO: 6364 - RNA, 22 nt, Artificial Sequence
  Synthetic
auggagaucagagccaggcugc

SEQ ID NO: 6365 - RNA, 22 nt, Artificial Sequence
  Synthetic
caccagcagcagccuggcucug

SEQ ID NO: 6366 - RNA, 22 nt, Artificial Sequence
  Synthetic
cagagccaggcugcugcuggug

SEQ ID NO: 6367 - RNA, 22 nt, Artificial Sequence
  Synthetic
cagcagcagccuggcucugauc

SEQ ID NO: 6368 - RNA, 22 nt, Artificial Sequence
  Synthetic
caggcugcugcuggugagccca

SEQ ID NO: 6369 - RNA, 22 nt, Artificial Sequence
  Synthetic
ccagcagcagccuggcucugau

SEQ ID NO: 6370 - RNA, 22 nt, Artificial Sequence
  Synthetic
ccaggcugcugcuggugagccc

SEQ ID NO: 6371 - RNA, 22 nt, Artificial Sequence
  Synthetic
cucaccagcagcagccuggcuc

SEQ ID NO: 6372 - RNA, 22 nt, Artificial Sequence
  Synthetic
cugcugcuggugagcccagcuc

SEQ ID NO: 6373 - RNA, 22 nt, Artificial Sequence
  Synthetic
cugcuggugagcccagcucucc

SEQ ID NO: 6374 - RNA, 22 nt, Artificial Sequence
  Synthetic
cugggcucaccagcagcagccu

SEQ ID NO: 6375 - RNA, 22 nt, Artificial Sequence
  Synthetic
cuggugagcccagcucuccucu

SEQ ID NO: 6376 - RNA, 22 nt, Artificial Sequence
  Synthetic
gagagcugggcucaccagcagc

SEQ ID NO: 6377 - RNA, 22 nt, Artificial Sequence
  Synthetic
gagaggagagcugggcucacca

SEQ ID NO: 6378 - RNA, 22 nt, Artificial Sequence
  Synthetic
gagccaggcugcugcuggugag

SEQ ID NO: 6379 - RNA, 22 nt, Artificial Sequence
  Synthetic
gagcugggcucaccagcagcag

SEQ ID NO: 6380 - RNA, 22 nt, Artificial Sequence
  Synthetic
gaggagagcugggcucaccagc

SEQ ID NO: 6381 - RNA, 22 nt, Artificial Sequence
  Synthetic
gaucagagccaggcugcugcug

SEQ ID NO: 6382 - RNA, 22 nt, Artificial Sequence
  Synthetic
gccaggcugcugcuggugagcc

SEQ ID NO: 6383 - RNA, 22 nt, Artificial Sequence
  Synthetic
gcucaccagcagcagccuggcu

SEQ ID NO: 6384 - RNA, 22 nt, Artificial Sequence
  Synthetic
gcugcugcuggugagcccagcu

SEQ ID NO: 6385 - RNA, 22 nt, Artificial Sequence
  Synthetic
gcugcuggugagcccagcucuc

SEQ ID NO: 6386 - RNA, 22 nt, Artificial Sequence
  Synthetic
gcugggcucaccagcagcagcc

SEQ ID NO: 6387 - RNA, 22 nt, Artificial Sequence
  Synthetic
gcuggugagcccagcucuccuc

SEQ ID NO: 6388 - RNA, 22 nt, Artificial Sequence
  Synthetic
ggagagcugggcucaccagcag

SEQ ID NO: 6389 - RNA, 22 nt, Artificial Sequence
  Synthetic
ggcucaccagcagcagccuggc

SEQ ID NO: 6390 - RNA, 22 nt, Artificial Sequence
  Synthetic
ggcugcugcuggugagcccagc

SEQ ID NO: 6391 - RNA, 22 nt, Artificial Sequence
  Synthetic
gggcucaccagcagcagccugg

SEQ ID NO: 6392 - RNA, 22 nt, Artificial Sequence
  Synthetic
ucaccagcagcagccuggcucu

SEQ ID NO: 6393 - RNA, 22 nt, Artificial Sequence
  Synthetic
ucagagccaggcugcugcuggu

SEQ ID NO: 6394 - RNA, 22 nt, Artificial Sequence
  Synthetic
ugcugcuggugagcccagcucu

SEQ ID NO: 6395 - RNA, 22 nt, Artificial Sequence
  Synthetic
ugcuggugagcccagcucuccu

SEQ ID NO: 6396 - RNA, 22 nt, Artificial Sequence
  Synthetic
ugggcucaccagcagcagccug

SEQ ID NO: 6397 - RNA, 20 nt, Artificial Sequence
  Synthetic
acauggagaucagagccagg

SEQ ID NO: 6398 - RNA, 20 nt, Artificial Sequence
  Synthetic
accggcagcggccuggcucu

SEQ ID NO: 6399 - RNA, 20 nt, Artificial Sequence
  Synthetic
agagccaggccgcugccggu

SEQ ID NO: 6400 - RNA, 20 nt, Artificial Sequence
  Synthetic
agagcugggcucaccggcag

SEQ ID NO: 6401 - RNA, 20 nt, Artificial Sequence
  Synthetic
agaucagagccaggccgcug

SEQ ID NO: 6402 - RNA, 20 nt, Artificial Sequence
  Synthetic
agccaggccgcugccgguga

SEQ ID NO: 6403 - RNA, 20 nt, Artificial Sequence
  Synthetic
agcggccuggcucugaucuc

SEQ ID NO: 6404 - RNA, 20 nt, Artificial Sequence
  Synthetic
agcugggcucaccggcagcg

SEQ ID NO: 6405 - RNA, 20 nt, Artificial Sequence
  Synthetic
aggccgcugccggugagccc

SEQ ID NO: 6406 - RNA, 20 nt, Artificial Sequence
  Synthetic
aucagagccaggccgcugcc

SEQ ID NO: 6407 - RNA, 20 nt, Artificial Sequence
  Synthetic
auggagaucagagccaggcc

SEQ ID NO: 6408 - RNA, 20 nt, Artificial Sequence
  Synthetic
caccggcagcggccuggcuc

SEQ ID NO: 6409 - RNA, 20 nt, Artificial Sequence
  Synthetic
cagagccaggccgcugccgg

SEQ ID NO: 6410 - RNA, 20 nt, Artificial Sequence
  Synthetic
cagcggccuggcucugaucu

SEQ ID NO: 6411 - RNA, 20 nt, Artificial Sequence
  Synthetic
caggccgcugccggugagcc

SEQ ID NO: 6412 - RNA, 20 nt, Artificial Sequence
  Synthetic
cauggagaucagagccaggc

SEQ ID NO: 6413 - RNA, 20 nt, Artificial Sequence
  Synthetic
ccaggccgcugccggugagc

SEQ ID NO: 6414 - RNA, 20 nt, Artificial Sequence
  Synthetic
ccgcugccggugagcccagc

SEQ ID NO: 6415 - RNA, 20 nt, Artificial Sequence
  Synthetic
ccggcagcggccuggcucug

SEQ ID NO: 6416 - RNA, 20 nt, Artificial Sequence
  Synthetic
cggcagcggccuggcucuga

SEQ ID NO: 6417 - RNA, 20 nt, Artificial Sequence
  Synthetic
cggccuggcucugaucucca

SEQ ID NO: 6418 - RNA, 20 nt, Artificial Sequence
  Synthetic
cuacauggagaucagagcca

SEQ ID NO: 6419 - RNA, 20 nt, Artificial Sequence
  Synthetic
cucaccggcagcggccuggc

SEQ ID NO: 6420 - RNA, 20 nt, Artificial Sequence
  Synthetic
cugggcucaccggcagcggc

SEQ ID NO: 6421 - RNA, 20 nt, Artificial Sequence
  Synthetic
gagagcugggcucaccggca

SEQ ID NO: 6422 - RNA, 20 nt, Artificial Sequence
  Synthetic
gagaucagagccaggccgcu

SEQ ID NO: 6423 - RNA, 20 nt, Artificial Sequence
  Synthetic
gagccaggccgcugccggug

SEQ ID NO: 6424 - RNA, 20 nt, Artificial Sequence
  Synthetic
gagcugggcucaccggcagc

SEQ ID NO: 6425 - RNA, 20 nt, Artificial Sequence
  Synthetic
gaucagagccaggccgcugc

SEQ ID NO: 6426 - RNA, 20 nt, Artificial Sequence
  Synthetic
gcagcggccuggcucugauc

SEQ ID NO: 6427 - RNA, 20 nt, Artificial Sequence
  Synthetic
gccaggccgcugccggugag

SEQ ID NO: 6428 - RNA, 20 nt, Artificial Sequence
  Synthetic
gccgcugccggugagcccag

SEQ ID NO: 6429 - RNA, 20 nt, Artificial Sequence
  Synthetic
gcggccuggcucugaucucc

SEQ ID NO: 6430 - RNA, 20 nt, Artificial Sequence
  Synthetic
gcucaccggcagcggccugg

SEQ ID NO: 6431 - RNA, 20 nt, Artificial Sequence
  Synthetic
gcugggcucaccggcagcgg

SEQ ID NO: 6432 - RNA, 20 nt, Artificial Sequence
  Synthetic
ggagagcugggcucaccggc

SEQ ID NO: 6433 - RNA, 20 nt, Artificial Sequence
  Synthetic
ggagaucagagccaggccgc

SEQ ID NO: 6434 - RNA, 20 nt, Artificial Sequence
  Synthetic
ggcagcggccuggcucugau

SEQ ID NO: 6435 - RNA, 20 nt, Artificial Sequence
  Synthetic
ggccgcugccggugagccca

SEQ ID NO: 6436 - RNA, 20 nt, Artificial Sequence
  Synthetic
ggcucaccggcagcggccug

SEQ ID NO: 6437 - RNA, 20 nt, Artificial Sequence
  Synthetic
gggcucaccggcagcggccu

SEQ ID NO: 6438 - RNA, 20 nt, Artificial Sequence
  Synthetic
uacauggagaucagagccag

SEQ ID NO: 6439 - RNA, 20 nt, Artificial Sequence
  Synthetic
ucaccggcagcggccuggcu

SEQ ID NO: 6440 - RNA, 20 nt, Artificial Sequence
  Synthetic
ucagagccaggccgcugccg

SEQ ID NO: 6441 - RNA, 20 nt, Artificial Sequence
  Synthetic
uggagaucagagccaggccg

SEQ ID NO: 6442 - RNA, 20 nt, Artificial Sequence
  Synthetic
ugggcucaccggcagcggcc

SEQ ID NO: 6443 - RNA, 21 nt, Artificial Sequence
  Synthetic
acauggagaucagagccaggc

SEQ ID NO: 6444 - RNA, 21 nt, Artificial Sequence
  Synthetic
accggcagcggccuggcucug

SEQ ID NO: 6445 - RNA, 21 nt, Artificial Sequence
  Synthetic
agagccaggccgcugccggug

SEQ ID NO: 6446 - RNA, 21 nt, Artificial Sequence
  Synthetic
agagcugggcucaccggcagc

SEQ ID NO: 6447 - RNA, 21 nt, Artificial Sequence
  Synthetic
agaucagagccaggccgcugc

SEQ ID NO: 6448 - RNA, 21 nt, Artificial Sequence
  Synthetic
agccaggccgcugccggugag

SEQ ID NO: 6449 - RNA, 21 nt, Artificial Sequence
  Synthetic
agcggccuggcucugaucucc

SEQ ID NO: 6450 - RNA, 21 nt, Artificial Sequence
  Synthetic
agcugggcucaccggcagcgg

SEQ ID NO: 6451 - RNA, 21 nt, Artificial Sequence
  Synthetic
aggagagcugggcucaccggc

SEQ ID NO: 6452 - RNA, 21 nt, Artificial Sequence
  Synthetic
aggccgcugccggugagccca

SEQ ID NO: 6453 - RNA, 21 nt, Artificial Sequence
  Synthetic
aucagagccaggccgcugccg

SEQ ID NO: 6454 - RNA, 21 nt, Artificial Sequence
  Synthetic
auggagaucagagccaggccg

SEQ ID NO: 6455 - RNA, 21 nt, Artificial Sequence
  Synthetic
caccggcagcggccuggcucu

SEQ ID NO: 6456 - RNA, 21 nt, Artificial Sequence
  Synthetic
cagagccaggccgcugccggu

SEQ ID NO: 6457 - RNA, 21 nt, Artificial Sequence
  Synthetic
cagcggccuggcucugaucuc

SEQ ID NO: 6458 - RNA, 21 nt, Artificial Sequence
  Synthetic
caggccgcugccggugagccc

SEQ ID NO: 6459 - RNA, 21 nt, Artificial Sequence
  Synthetic
cauggagaucagagccaggcc

SEQ ID NO: 6460 - RNA, 21 nt, Artificial Sequence
  Synthetic
ccaggccgcugccggugagcc

SEQ ID NO: 6461 - RNA, 21 nt, Artificial Sequence
  Synthetic
ccgcugccggugagcccagcu

SEQ ID NO: 6462 - RNA, 21 nt, Artificial Sequence
  Synthetic
ccggcagcggccuggcucuga

SEQ ID NO: 6463 - RNA, 21 nt, Artificial Sequence
  Synthetic
cggcagcggccuggcucugau

SEQ ID NO: 6464 - RNA, 21 nt, Artificial Sequence
  Synthetic
cggccuggcucugaucuccau

SEQ ID NO: 6465 - RNA, 21 nt, Artificial Sequence
  Synthetic
cuacauggagaucagagccag

SEQ ID NO: 6466 - RNA, 21 nt, Artificial Sequence
  Synthetic
cucaccggcagcggccuggcu

SEQ ID NO: 6467 - RNA, 21 nt, Artificial Sequence
  Synthetic
cugggcucaccggcagcggcc

SEQ ID NO: 6468 - RNA, 21 nt, Artificial Sequence
  Synthetic
gagagcugggcucaccggcag

SEQ ID NO: 6469 - RNA, 21 nt, Artificial Sequence
  Synthetic
gagaucagagccaggccgcug

SEQ ID NO: 6470 - RNA, 21 nt, Artificial Sequence
  Synthetic
gagccaggccgcugccgguga

SEQ ID NO: 6471 - RNA, 21 nt, Artificial Sequence
  Synthetic
gagcugggcucaccggcagcg

SEQ ID NO: 6472 - RNA, 21 nt, Artificial Sequence
  Synthetic
gaucagagccaggccgcugcc

SEQ ID NO: 6473 - RNA, 21 nt, Artificial Sequence
  Synthetic
gcagcggccuggcucugaucu

SEQ ID NO: 6474 - RNA, 21 nt, Artificial Sequence
  Synthetic
gccaggccgcugccggugagc

SEQ ID NO: 6475 - RNA, 21 nt, Artificial Sequence
  Synthetic
gccgcugccggugagcccagc

SEQ ID NO: 6476 - RNA, 21 nt, Artificial Sequence
  Synthetic
gcggccuggcucugaucucca

SEQ ID NO: 6477 - RNA, 21 nt, Artificial Sequence
  Synthetic
gcucaccggcagcggccuggc

SEQ ID NO: 6478 - RNA, 21 nt, Artificial Sequence
  Synthetic
gcugggcucaccggcagcggc

SEQ ID NO: 6479 - RNA, 21 nt, Artificial Sequence
  Synthetic
ggagagcugggcucaccggca

SEQ ID NO: 6480 - RNA, 21 nt, Artificial Sequence
  Synthetic
ggagaucagagccaggccgcu

SEQ ID NO: 6481 - RNA, 21 nt, Artificial Sequence
  Synthetic
ggcagcggccuggcucugauc

SEQ ID NO: 6482 - RNA, 21 nt, Artificial Sequence
  Synthetic
ggccgcugccggugagcccag

SEQ ID NO: 6483 - RNA, 21 nt, Artificial Sequence
  Synthetic
ggcucaccggcagcggccugg

SEQ ID NO: 6484 - RNA, 21 nt, Artificial Sequence
  Synthetic
gggcucaccggcagcggccug

SEQ ID NO: 6485 - RNA, 21 nt, Artificial Sequence
  Synthetic
uacauggagaucagagccagg

SEQ ID NO: 6486 - RNA, 21 nt, Artificial Sequence
  Synthetic
ucaccggcagcggccuggcuc

SEQ ID NO: 6487 - RNA, 21 nt, Artificial Sequence
  Synthetic
ucagagccaggccgcugccgg

SEQ ID NO: 6488 - RNA, 21 nt, Artificial Sequence
  Synthetic
ucuacauggagaucagagcca

SEQ ID NO: 6489 - RNA, 21 nt, Artificial Sequence
  Synthetic
uggagaucagagccaggccgc

SEQ ID NO: 6490 - RNA, 21 nt, Artificial Sequence
  Synthetic
ugggcucaccggcagcggccu

SEQ ID NO: 6491 - RNA, 22 nt, Artificial Sequence
  Synthetic
acauggagaucagagccaggcc

SEQ ID NO: 6492 - RNA, 22 nt, Artificial Sequence
  Synthetic
accggcagcggccuggcucuga

SEQ ID NO: 6493 - RNA, 22 nt, Artificial Sequence
  Synthetic
agagccaggccgcugccgguga

SEQ ID NO: 6494 - RNA, 22 nt, Artificial Sequence
  Synthetic
agagcugggcucaccggcagcg

SEQ ID NO: 6495 - RNA, 22 nt, Artificial Sequence
  Synthetic
agaucagagccaggccgcugcc

SEQ ID NO: 6496 - RNA, 22 nt, Artificial Sequence
  Synthetic
agccaggccgcugccggugagc

SEQ ID NO: 6497 - RNA, 22 nt, Artificial Sequence
  Synthetic
agcggccuggcucugaucucca

SEQ ID NO: 6498 - RNA, 22 nt, Artificial Sequence
  Synthetic
agcugggcucaccggcagcggc

SEQ ID NO: 6499 - RNA, 22 nt, Artificial Sequence
  Synthetic
aggagagcugggcucaccggca

SEQ ID NO: 6500 - RNA, 22 nt, Artificial Sequence
  Synthetic
aggccgcugccggugagcccag

SEQ ID NO: 6501 - RNA, 22 nt, Artificial Sequence
  Synthetic
aucagagccaggccgcugccgg

SEQ ID NO: 6502 - RNA, 22 nt, Artificial Sequence
  Synthetic
auggagaucagagccaggccgc

SEQ ID NO: 6503 - RNA, 22 nt, Artificial Sequence
  Synthetic
caccggcagcggccuggcucug

SEQ ID NO: 6504 - RNA, 22 nt, Artificial Sequence
  Synthetic
cagagccaggccgcugccggug

SEQ ID NO: 6505 - RNA, 22 nt, Artificial Sequence
  Synthetic
cagcggccuggcucugaucucc

SEQ ID NO: 6506 - RNA, 22 nt, Artificial Sequence
  Synthetic
caggccgcugccggugagccca

SEQ ID NO: 6507 - RNA, 22 nt, Artificial Sequence
  Synthetic
cauggagaucagagccaggccg

SEQ ID NO: 6508 - RNA, 22 nt, Artificial Sequence
  Synthetic
ccaggccgcugccggugagccc

SEQ ID NO: 6509 - RNA, 22 nt, Artificial Sequence
  Synthetic
ccgcugccggugagcccagcuc

SEQ ID NO: 6510 - RNA, 22 nt, Artificial Sequence
  Synthetic
ccggcagcggccuggcucugau

SEQ ID NO: 6511 - RNA, 22 nt, Artificial Sequence
  Synthetic
cggcagcggccuggcucugauc

SEQ ID NO: 6512 - RNA, 22 nt, Artificial Sequence
  Synthetic
cggccuggcucugaucuccaug

SEQ ID NO: 6513 - RNA, 22 nt, Artificial Sequence
  Synthetic
cuacauggagaucagagccagg

SEQ ID NO: 6514 - RNA, 22 nt, Artificial Sequence
  Synthetic
cucaccggcagcggccuggcuc

SEQ ID NO: 6515 - RNA, 22 nt, Artificial Sequence
  Synthetic
cucuacauggagaucagagcca

SEQ ID NO: 6516 - RNA, 22 nt, Artificial Sequence
  Synthetic
cugggcucaccggcagcggccu

SEQ ID NO: 6517 - RNA, 22 nt, Artificial Sequence
  Synthetic
gagagcugggcucaccggcagc

SEQ ID NO: 6518 - RNA, 22 nt, Artificial Sequence
  Synthetic
gagaucagagccaggccgcugc

SEQ ID NO: 6519 - RNA, 22 nt, Artificial Sequence
  Synthetic
gagccaggccgcugccggugag

SEQ ID NO: 6520 - RNA, 22 nt, Artificial Sequence
  Synthetic
gagcugggcucaccggcagcgg

SEQ ID NO: 6521 - RNA, 22 nt, Artificial Sequence
  Synthetic
gaggagagcugggcucaccggc

SEQ ID NO: 6522 - RNA, 22 nt, Artificial Sequence
  Synthetic
gaucagagccaggccgcugccg

SEQ ID NO: 6523 - RNA, 22 nt, Artificial Sequence
  Synthetic
gcagcggccuggcucugaucuc

SEQ ID NO: 6524 - RNA, 22 nt, Artificial Sequence
  Synthetic
gccaggccgcugccggugagcc

SEQ ID NO: 6525 - RNA, 22 nt, Artificial Sequence
  Synthetic
gccgcugccggugagcccagcu

SEQ ID NO: 6526 - RNA, 22 nt, Artificial Sequence
  Synthetic
gcggccuggcucugaucuccau

SEQ ID NO: 6527 - RNA, 22 nt, Artificial Sequence
  Synthetic
gcucaccggcagcggccuggcu

SEQ ID NO: 6528 - RNA, 22 nt, Artificial Sequence
  Synthetic
gcugggcucaccggcagcggcc

SEQ ID NO: 6529 - RNA, 22 nt, Artificial Sequence
  Synthetic
ggagagcugggcucaccggcag

SEQ ID NO: 6530 - RNA, 22 nt, Artificial Sequence
  Synthetic
ggagaucagagccaggccgcug

SEQ ID NO: 6531 - RNA, 22 nt, Artificial Sequence
  Synthetic
ggcagcggccuggcucugaucu

SEQ ID NO: 6532 - RNA, 22 nt, Artificial Sequence
  Synthetic
ggccgcugccggugagcccagc

SEQ ID NO: 6533 - RNA, 22 nt, Artificial Sequence
  Synthetic
ggcucaccggcagcggccuggc

SEQ ID NO: 6534 - RNA, 22 nt, Artificial Sequence
  Synthetic
gggcucaccggcagcggccugg

SEQ ID NO: 6535 - RNA, 22 nt, Artificial Sequence
  Synthetic
uacauggagaucagagccaggc

SEQ ID NO: 6536 - RNA, 22 nt, Artificial Sequence
  Synthetic
ucaccggcagcggccuggcucu

SEQ ID NO: 6537 - RNA, 22 nt, Artificial Sequence
  Synthetic
ucagagccaggccgcugccggu

SEQ ID NO: 6538 - RNA, 22 nt, Artificial Sequence
  Synthetic
ucuacauggagaucagagccag

SEQ ID NO: 6539 - RNA, 22 nt, Artificial Sequence
  Synthetic
uggagaucagagccaggccgcu

SEQ ID NO: 6540 - RNA, 22 nt, Artificial Sequence
  Synthetic
ugggcucaccggcagcggccug

SEQ ID NO: 6541 - RNA, 20 nt, Artificial Sequence
  Synthetic
acauggagaucagagucagg

SEQ ID NO: 6542 - RNA, 20 nt, Artificial Sequence
  Synthetic
accggcagcagccugacucu

SEQ ID NO: 6543 - RNA, 20 nt, Artificial Sequence
  Synthetic
agagucaggcugcugccggu

SEQ ID NO: 6544 - RNA, 20 nt, Artificial Sequence
  Synthetic
agaucagagucaggcugcug

SEQ ID NO: 6545 - RNA, 20 nt, Artificial Sequence
  Synthetic
agcagccugacucugaucuc

SEQ ID NO: 6546 - RNA, 20 nt, Artificial Sequence
  Synthetic
agccugacucugaucuccau

SEQ ID NO: 6547 - RNA, 20 nt, Artificial Sequence
  Synthetic
agucaggcugcugccgguga

SEQ ID NO: 6548 - RNA, 20 nt, Artificial Sequence
  Synthetic
aucagagucaggcugcugcc

SEQ ID NO: 6549 - RNA, 20 nt, Artificial Sequence
  Synthetic
auggagaucagagucaggcu

SEQ ID NO: 6550 - RNA, 20 nt, Artificial Sequence
  Synthetic
caccggcagcagccugacuc

SEQ ID NO: 6551 - RNA, 20 nt, Artificial Sequence
  Synthetic
cagagucaggcugcugccgg

SEQ ID NO: 6552 - RNA, 20 nt, Artificial Sequence
  Synthetic
cagcagccugacucugaucu

SEQ ID NO: 6553 - RNA, 20 nt, Artificial Sequence
  Synthetic
cagccugacucugaucucca

SEQ ID NO: 6554 - RNA, 20 nt, Artificial Sequence
  Synthetic
cauggagaucagagucaggc

SEQ ID NO: 6555 - RNA, 20 nt, Artificial Sequence
  Synthetic
ccggcagcagccugacucug

SEQ ID NO: 6556 - RNA, 20 nt, Artificial Sequence
  Synthetic
ccugacucugaucuccaugu

SEQ ID NO: 6557 - RNA, 20 nt, Artificial Sequence
  Synthetic
cggcagcagccugacucuga

SEQ ID NO: 6558 - RNA, 20 nt, Artificial Sequence
  Synthetic
cgugcucuacauggagauca

SEQ ID NO: 6559 - RNA, 20 nt, Artificial Sequence
  Synthetic
cuacauggagaucagaguca

SEQ ID NO: 6560 - RNA, 20 nt, Artificial Sequence
  Synthetic
cucaccggcagcagccugac

SEQ ID NO: 6561 - RNA, 20 nt, Artificial Sequence
  Synthetic
cucuacauggagaucagagu

SEQ ID NO: 6562 - RNA, 20 nt, Artificial Sequence
  Synthetic
cugacucugaucuccaugua

SEQ ID NO: 6563 - RNA, 20 nt, Artificial Sequence
  Synthetic
cugggcucaccggcagcagc

SEQ ID NO: 6564 - RNA, 20 nt, Artificial Sequence
  Synthetic
gacucugaucuccauguaga

SEQ ID NO: 6565 - RNA, 20 nt, Artificial Sequence
  Synthetic
gagaucagagucaggcugcu

SEQ ID NO: 6566 - RNA, 20 nt, Artificial Sequence
  Synthetic
gagucaggcugcugccggug

SEQ ID NO: 6567 - RNA, 20 nt, Artificial Sequence
  Synthetic
gaucagagucaggcugcugc

SEQ ID NO: 6568 - RNA, 20 nt, Artificial Sequence
  Synthetic
gcagcagccugacucugauc

SEQ ID NO: 6569 - RNA, 20 nt, Artificial Sequence
  Synthetic
gcagccugacucugaucucc

SEQ ID NO: 6570 - RNA, 20 nt, Artificial Sequence
  Synthetic
gccugacucugaucuccaug

SEQ ID NO: 6571 - RNA, 20 nt, Artificial Sequence
  Synthetic
gcucaccggcagcagccuga

SEQ ID NO: 6572 - RNA, 20 nt, Artificial Sequence
  Synthetic
gcucuacauggagaucagag

SEQ ID NO: 6573 - RNA, 20 nt, Artificial Sequence
  Synthetic
ggagaucagagucaggcugc

SEQ ID NO: 6574 - RNA, 20 nt, Artificial Sequence
  Synthetic
ggcagcagccugacucugau

SEQ ID NO: 6575 - RNA, 20 nt, Artificial Sequence
  Synthetic
ggcucaccggcagcagccug

SEQ ID NO: 6576 - RNA, 20 nt, Artificial Sequence
  Synthetic
gggcucaccggcagcagccu

SEQ ID NO: 6577 - RNA, 20 nt, Artificial Sequence
  Synthetic
gucaggcugcugccggugag

SEQ ID NO: 6578 - RNA, 20 nt, Artificial Sequence
  Synthetic
gugcucuacauggagaucag

SEQ ID NO: 6579 - RNA, 20 nt, Artificial Sequence
  Synthetic
uacauggagaucagagucag

SEQ ID NO: 6580 - RNA, 20 nt, Artificial Sequence
  Synthetic
ucaccggcagcagccugacu

SEQ ID NO: 6581 - RNA, 20 nt, Artificial Sequence
  Synthetic
ucagagucaggcugcugccg

SEQ ID NO: 6582 - RNA, 20 nt, Artificial Sequence
  Synthetic
ucuacauggagaucagaguc

SEQ ID NO: 6583 - RNA, 20 nt, Artificial Sequence
  Synthetic
ugacucugaucuccauguag

SEQ ID NO: 6584 - RNA, 20 nt, Artificial Sequence
  Synthetic
ugcucuacauggagaucaga

SEQ ID NO: 6585 - RNA, 20 nt, Artificial Sequence
  Synthetic
uggagaucagagucaggcug

SEQ ID NO: 6586 - RNA, 20 nt, Artificial Sequence
  Synthetic
ugggcucaccggcagcagcc

SEQ ID NO: 6587 - RNA, 21 nt, Artificial Sequence
  Synthetic
acauggagaucagagucaggc

SEQ ID NO: 6588 - RNA, 21 nt, Artificial Sequence
  Synthetic
accggcagcagccugacucug

SEQ ID NO: 6589 - RNA, 21 nt, Artificial Sequence
  Synthetic
acgugcucuacauggagauca

SEQ ID NO: 6590 - RNA, 21 nt, Artificial Sequence
  Synthetic
agagucaggcugcugccggug

SEQ ID NO: 6591 - RNA, 21 nt, Artificial Sequence
  Synthetic
agaucagagucaggcugcugc

SEQ ID NO: 6592 - RNA, 21 nt, Artificial Sequence
  Synthetic
agcagccugacucugaucucc

SEQ ID NO: 6593 - RNA, 21 nt, Artificial Sequence
  Synthetic
agccugacucugaucuccaug

SEQ ID NO: 6594 - RNA, 21 nt, Artificial Sequence
  Synthetic
agucaggcugcugccggugag

SEQ ID NO: 6595 - RNA, 21 nt, Artificial Sequence
  Synthetic
aucagagucaggcugcugccg

SEQ ID NO: 6596 - RNA, 21 nt, Artificial Sequence
  Synthetic
auggagaucagagucaggcug

SEQ ID NO: 6597 - RNA, 21 nt, Artificial Sequence
  Synthetic
caccggcagcagccugacucu

SEQ ID NO: 6598 - RNA, 21 nt, Artificial Sequence
  Synthetic
cagagucaggcugcugccggu

SEQ ID NO: 6599 - RNA, 21 nt, Artificial Sequence
  Synthetic
cagcagccugacucugaucuc

SEQ ID NO: 6600 - RNA, 21 nt, Artificial Sequence
  Synthetic
cagccugacucugaucuccau

SEQ ID NO: 6601 - RNA, 21 nt, Artificial Sequence
  Synthetic
cauggagaucagagucaggcu

SEQ ID NO: 6602 - RNA, 21 nt, Artificial Sequence
  Synthetic
ccggcagcagccugacucuga

SEQ ID NO: 6603 - RNA, 21 nt, Artificial Sequence
  Synthetic
ccugacucugaucuccaugua

SEQ ID NO: 6604 - RNA, 21 nt, Artificial Sequence
  Synthetic
cggcagcagccugacucugau

SEQ ID NO: 6605 - RNA, 21 nt, Artificial Sequence
  Synthetic
cgugcucuacauggagaucag

SEQ ID NO: 6606 - RNA, 21 nt, Artificial Sequence
  Synthetic
cuacauggagaucagagucag

SEQ ID NO: 6607 - RNA, 21 nt, Artificial Sequence
  Synthetic
cucaccggcagcagccugacu

SEQ ID NO: 6608 - RNA, 21 nt, Artificial Sequence
  Synthetic
cucuacauggagaucagaguc

SEQ ID NO: 6609 - RNA, 21 nt, Artificial Sequence
  Synthetic
cugacucugaucuccauguag

SEQ ID NO: 6610 - RNA, 21 nt, Artificial Sequence
  Synthetic
cugggcucaccggcagcagcc

SEQ ID NO: 6611 - RNA, 21 nt, Artificial Sequence
  Synthetic
gacucugaucuccauguagag

SEQ ID NO: 6612 - RNA, 21 nt, Artificial Sequence
  Synthetic
gagaucagagucaggcugcug

SEQ ID NO: 6613 - RNA, 21 nt, Artificial Sequence
  Synthetic
gagucaggcugcugccgguga

SEQ ID NO: 6614 - RNA, 21 nt, Artificial Sequence
  Synthetic
gaucagagucaggcugcugcc

SEQ ID NO: 6615 - RNA, 21 nt, Artificial Sequence
  Synthetic
gcagcagccugacucugaucu

SEQ ID NO: 6616 - RNA, 21 nt, Artificial Sequence
  Synthetic
gcagccugacucugaucucca

SEQ ID NO: 6617 - RNA, 21 nt, Artificial Sequence
  Synthetic
gccugacucugaucuccaugu

SEQ ID NO: 6618 - RNA, 21 nt, Artificial Sequence
  Synthetic
gcucaccggcagcagccugac

SEQ ID NO: 6619 - RNA, 21 nt, Artificial Sequence
  Synthetic
gcucuacauggagaucagagu

SEQ ID NO: 6620 - RNA, 21 nt, Artificial Sequence
  Synthetic
gcugggcucaccggcagcagc

SEQ ID NO: 6621 - RNA, 21 nt, Artificial Sequence
  Synthetic
ggagaucagagucaggcugcu

SEQ ID NO: 6622 - RNA, 21 nt, Artificial Sequence
  Synthetic
ggcagcagccugacucugauc

SEQ ID NO: 6623 - RNA, 21 nt, Artificial Sequence
  Synthetic
ggcucaccggcagcagccuga

SEQ ID NO: 6624 - RNA, 21 nt, Artificial Sequence
  Synthetic
gggcucaccggcagcagccug

SEQ ID NO: 6625 - RNA, 21 nt, Artificial Sequence
  Synthetic
gucaggcugcugccggugagc

SEQ ID NO: 6626 - RNA, 21 nt, Artificial Sequence
  Synthetic
gugcucuacauggagaucaga

SEQ ID NO: 6627 - RNA, 21 nt, Artificial Sequence
  Synthetic
uacauggagaucagagucagg

SEQ ID NO: 6628 - RNA, 21 nt, Artificial Sequence
  Synthetic
ucaccggcagcagccugacuc

SEQ ID NO: 6629 - RNA, 21 nt, Artificial Sequence
  Synthetic
ucagagucaggcugcugccgg

SEQ ID NO: 6630 - RNA, 21 nt, Artificial Sequence
  Synthetic
ucuacauggagaucagaguca

SEQ ID NO: 6631 - RNA, 21 nt, Artificial Sequence
  Synthetic
ugacucugaucuccauguaga

SEQ ID NO: 6632 - RNA, 21 nt, Artificial Sequence
  Synthetic
ugcucuacauggagaucagag

SEQ ID NO: 6633 - RNA, 21 nt, Artificial Sequence
  Synthetic
uggagaucagagucaggcugc

SEQ ID NO: 6634 - RNA, 21 nt, Artificial Sequence
  Synthetic
ugggcucaccggcagcagccu

SEQ ID NO: 6635 - RNA, 22 nt, Artificial Sequence
  Synthetic
aacgugcucuacauggagauca

SEQ ID NO: 6636 - RNA, 22 nt, Artificial Sequence
  Synthetic
acauggagaucagagucaggcu

SEQ ID NO: 6637 - RNA, 22 nt, Artificial Sequence
  Synthetic
accggcagcagccugacucuga

SEQ ID NO: 6638 - RNA, 22 nt, Artificial Sequence
  Synthetic
acgugcucuacauggagaucag

SEQ ID NO: 6639 - RNA, 22 nt, Artificial Sequence
  Synthetic
agagucaggcugcugccgguga

SEQ ID NO: 6640 - RNA, 22 nt, Artificial Sequence
  Synthetic
agaucagagucaggcugcugcc

SEQ ID NO: 6641 - RNA, 22 nt, Artificial Sequence
  Synthetic
agcagccugacucugaucucca

SEQ ID NO: 6642 - RNA, 22 nt, Artificial Sequence
  Synthetic
agccugacucugaucuccaugu

SEQ ID NO: 6643 - RNA, 22 nt, Artificial Sequence
  Synthetic
agcugggcucaccggcagcagc

SEQ ID NO: 6644 - RNA, 22 nt, Artificial Sequence
  Synthetic
agucaggcugcugccggugagc

SEQ ID NO: 6645 - RNA, 22 nt, Artificial Sequence
  Synthetic
aucagagucaggcugcugccgg

SEQ ID NO: 6646 - RNA, 22 nt, Artificial Sequence
  Synthetic
auggagaucagagucaggcugc

SEQ ID NO: 6647 - RNA, 22 nt, Artificial Sequence
  Synthetic
caccggcagcagccugacucug

SEQ ID NO: 6648 - RNA, 22 nt, Artificial Sequence
  Synthetic
cagagucaggcugcugccggug

SEQ ID NO: 6649 - RNA, 22 nt, Artificial Sequence
  Synthetic
cagcagccugacucugaucucc

SEQ ID NO: 6650 - RNA, 22 nt, Artificial Sequence
  Synthetic
cagccugacucugaucuccaug

SEQ ID NO: 6651 - RNA, 22 nt, Artificial Sequence
  Synthetic
cauggagaucagagucaggcug

SEQ ID NO: 6652 - RNA, 22 nt, Artificial Sequence
  Synthetic
ccggcagcagccugacucugau

SEQ ID NO: 6653 - RNA, 22 nt, Artificial Sequence
  Synthetic
ccugacucugaucuccauguag

SEQ ID NO: 6654 - RNA, 22 nt, Artificial Sequence
  Synthetic
cggcagcagccugacucugauc

SEQ ID NO: 6655 - RNA, 22 nt, Artificial Sequence
  Synthetic
cgugcucuacauggagaucaga

SEQ ID NO: 6656 - RNA, 22 nt, Artificial Sequence
  Synthetic
cuacauggagaucagagucagg

SEQ ID NO: 6657 - RNA, 22 nt, Artificial Sequence
  Synthetic
cucaccggcagcagccugacuc

SEQ ID NO: 6658 - RNA, 22 nt, Artificial Sequence
  Synthetic
cucuacauggagaucagaguca

SEQ ID NO: 6659 - RNA, 22 nt, Artificial Sequence
  Synthetic
cugacucugaucuccauguaga

SEQ ID NO: 6660 - RNA, 22 nt, Artificial Sequence
  Synthetic
cugggcucaccggcagcagccu

SEQ ID NO: 6661 - RNA, 22 nt, Artificial Sequence
  Synthetic
gacucugaucuccauguagagc

SEQ ID NO: 6662 - RNA, 22 nt, Artificial Sequence
  Synthetic
gagaucagagucaggcugcugc

SEQ ID NO: 6663 - RNA, 22 nt, Artificial Sequence
  Synthetic
gagucaggcugcugccggugag

SEQ ID NO: 6664 - RNA, 22 nt, Artificial Sequence
  Synthetic
gaucagagucaggcugcugccg

SEQ ID NO: 6665 - RNA, 22 nt, Artificial Sequence
  Synthetic
gcagcagccugacucugaucuc

SEQ ID NO: 6666 - RNA, 22 nt, Artificial Sequence
  Synthetic
gcagccugacucugaucuccau

SEQ ID NO: 6667 - RNA, 22 nt, Artificial Sequence
  Synthetic
gccugacucugaucuccaugua

SEQ ID NO: 6668 - RNA, 22 nt, Artificial Sequence
  Synthetic
gcucaccggcagcagccugacu

SEQ ID NO: 6669 - RNA, 22 nt, Artificial Sequence
  Synthetic
gcucuacauggagaucagaguc

SEQ ID NO: 6670 - RNA, 22 nt, Artificial Sequence
  Synthetic
gcugggcucaccggcagcagcc

SEQ ID NO: 6671 - RNA, 22 nt, Artificial Sequence
  Synthetic
ggagaucagagucaggcugcug

SEQ ID NO: 6672 - RNA, 22 nt, Artificial Sequence
  Synthetic
ggcagcagccugacucugaucu

SEQ ID NO: 6673 - RNA, 22 nt, Artificial Sequence
  Synthetic
ggcucaccggcagcagccugac

SEQ ID NO: 6674 - RNA, 22 nt, Artificial Sequence
  Synthetic
gggcucaccggcagcagccuga

SEQ ID NO: 6675 - RNA, 22 nt, Artificial Sequence
  Synthetic
gucaggcugcugccggugagcc

SEQ ID NO: 6676 - RNA, 22 nt, Artificial Sequence
  Synthetic
gugcucuacauggagaucagag

SEQ ID NO: 6677 - RNA, 22 nt, Artificial Sequence
  Synthetic
uacauggagaucagagucaggc

SEQ ID NO: 6678 - RNA, 22 nt, Artificial Sequence
  Synthetic
ucaccggcagcagccugacucu

SEQ ID NO: 6679 - RNA, 22 nt, Artificial Sequence
  Synthetic
ucagagucaggcugcugccggu

SEQ ID NO: 6680 - RNA, 22 nt, Artificial Sequence
  Synthetic
ucuacauggagaucagagucag

SEQ ID NO: 6681 - RNA, 22 nt, Artificial Sequence
  Synthetic
ugacucugaucuccauguagag

SEQ ID NO: 6682 - RNA, 22 nt, Artificial Sequence
  Synthetic
ugcucuacauggagaucagagu

SEQ ID NO: 6683 - RNA, 22 nt, Artificial Sequence
  Synthetic
uggagaucagagucaggcugcu

SEQ ID NO: 6684 - RNA, 22 nt, Artificial Sequence
  Synthetic
ugggcucaccggcagcagccug

SEQ ID NO: 6685 - RNA, 20 nt, Artificial Sequence
  Synthetic
aacgugcucuacauagagau

SEQ ID NO: 6686 - RNA, 20 nt, Artificial Sequence
  Synthetic
acaacgugcucuacauagag

SEQ ID NO: 6687 - RNA, 20 nt, Artificial Sequence
  Synthetic
acauagagaucagagccagg

SEQ ID NO: 6688 - RNA, 20 nt, Artificial Sequence
  Synthetic
acgaggacaacgugcucuac

SEQ ID NO: 6689 - RNA, 20 nt, Artificial Sequence
  Synthetic
acgugcucuacauagagauc

SEQ ID NO: 6690 - RNA, 20 nt, Artificial Sequence
  Synthetic
agcagccuggcucugaucuc

SEQ ID NO: 6691 - RNA, 20 nt, Artificial Sequence
  Synthetic
agccuggcucugaucucuau

SEQ ID NO: 6692 - RNA, 20 nt, Artificial Sequence
  Synthetic
aggacaacgugcucuacaua

SEQ ID NO: 6693 - RNA, 20 nt, Artificial Sequence
  Synthetic
auagagaucagagccaggcu

SEQ ID NO: 6694 - RNA, 20 nt, Artificial Sequence
  Synthetic
aucucuauguagagcacguu

SEQ ID NO: 6695 - RNA, 20 nt, Artificial Sequence
  Synthetic
caacgugcucuacauagaga

SEQ ID NO: 6696 - RNA, 20 nt, Artificial Sequence
  Synthetic
cagcagccuggcucugaucu

SEQ ID NO: 6697 - RNA, 20 nt, Artificial Sequence
  Synthetic
cagccuggcucugaucucua

SEQ ID NO: 6698 - RNA, 20 nt, Artificial Sequence
  Synthetic
cauagagaucagagccaggc

SEQ ID NO: 6699 - RNA, 20 nt, Artificial Sequence
  Synthetic
ccuggcucugaucucuaugu

SEQ ID NO: 6700 - RNA, 20 nt, Artificial Sequence
  Synthetic
cgaggacaacgugcucuaca

SEQ ID NO: 6701 - RNA, 20 nt, Artificial Sequence
  Synthetic
cgugcucuacauagagauca

SEQ ID NO: 6702 - RNA, 20 nt, Artificial Sequence
  Synthetic
cuacauagagaucagagcca

SEQ ID NO: 6703 - RNA, 20 nt, Artificial Sequence
  Synthetic
cuauguagagcacguugucc

SEQ ID NO: 6704 - RNA, 20 nt, Artificial Sequence
  Synthetic
cucuacauagagaucagagc

SEQ ID NO: 6705 - RNA, 20 nt, Artificial Sequence
  Synthetic
cucuauguagagcacguugu

SEQ ID NO: 6706 - RNA, 20 nt, Artificial Sequence
  Synthetic
cucugaucucuauguagagc

SEQ ID NO: 6707 - RNA, 20 nt, Artificial Sequence
  Synthetic
cugaucucuauguagagcac

SEQ ID NO: 6708 - RNA, 20 nt, Artificial Sequence
  Synthetic
cuggcucugaucucuaugua

SEQ ID NO: 6709 - RNA, 20 nt, Artificial Sequence
  Synthetic
gacaacgugcucuacauaga

SEQ ID NO: 6710 - RNA, 20 nt, Artificial Sequence
  Synthetic
gaggacaacgugcucuacau

SEQ ID NO: 6711 - RNA, 20 nt, Artificial Sequence
  Synthetic
gaucucuauguagagcacgu

SEQ ID NO: 6712 - RNA, 20 nt, Artificial Sequence
  Synthetic
gcagcagccuggcucugauc

SEQ ID NO: 6713 - RNA, 20 nt, Artificial Sequence
  Synthetic
gcagccuggcucugaucucu

SEQ ID NO: 6714 - RNA, 20 nt, Artificial Sequence
  Synthetic
gccuggcucugaucucuaug

SEQ ID NO: 6715 - RNA, 20 nt, Artificial Sequence
  Synthetic
gcucuacauagagaucagag

SEQ ID NO: 6716 - RNA, 20 nt, Artificial Sequence
  Synthetic
gcucugaucucuauguagag

SEQ ID NO: 6717 - RNA, 20 nt, Artificial Sequence
  Synthetic
ggacaacgugcucuacauag

SEQ ID NO: 6718 - RNA, 20 nt, Artificial Sequence
  Synthetic
ggcagcagccuggcucugau

SEQ ID NO: 6719 - RNA, 20 nt, Artificial Sequence
  Synthetic
ggcucugaucucuauguaga

SEQ ID NO: 6720 - RNA, 20 nt, Artificial Sequence
  Synthetic
gugcucuacauagagaucag

SEQ ID NO: 6721 - RNA, 20 nt, Artificial Sequence
  Synthetic
uacauagagaucagagccag

SEQ ID NO: 6722 - RNA, 20 nt, Artificial Sequence
  Synthetic
uacgaggacaacgugcucua

SEQ ID NO: 6723 - RNA, 20 nt, Artificial Sequence
  Synthetic
uagagaucagagccaggcug

SEQ ID NO: 6724 - RNA, 20 nt, Artificial Sequence
  Synthetic
ucuacauagagaucagagcc

SEQ ID NO: 6725 - RNA, 20 nt, Artificial Sequence
  Synthetic
ucuauguagagcacguuguc

SEQ ID NO: 6726 - RNA, 20 nt, Artificial Sequence
  Synthetic
ucucuauguagagcacguug

SEQ ID NO: 6727 - RNA, 20 nt, Artificial Sequence
  Synthetic
ucugaucucuauguagagca

SEQ ID NO: 6728 - RNA, 20 nt, Artificial Sequence
  Synthetic
ugaucucuauguagagcacg

SEQ ID NO: 6729 - RNA, 20 nt, Artificial Sequence
  Synthetic
ugcucuacauagagaucaga

SEQ ID NO: 6730 - RNA, 20 nt, Artificial Sequence
  Synthetic
uggcucugaucucuauguag

SEQ ID NO: 6731 - RNA, 21 nt, Artificial Sequence
  Synthetic
aacgugcucuacauagagauc

SEQ ID NO: 6732 - RNA, 21 nt, Artificial Sequence
  Synthetic
acaacgugcucuacauagaga

SEQ ID NO: 6733 - RNA, 21 nt, Artificial Sequence
  Synthetic
acauagagaucagagccaggc

SEQ ID NO: 6734 - RNA, 21 nt, Artificial Sequence
  Synthetic
acgaggacaacgugcucuaca

SEQ ID NO: 6735 - RNA, 21 nt, Artificial Sequence
  Synthetic
acgugcucuacauagagauca

SEQ ID NO: 6736 - RNA, 21 nt, Artificial Sequence
  Synthetic
agcagccuggcucugaucucu

SEQ ID NO: 6737 - RNA, 21 nt, Artificial Sequence
  Synthetic
agccuggcucugaucucuaug

SEQ ID NO: 6738 - RNA, 21 nt, Artificial Sequence
  Synthetic
aggacaacgugcucuacauag

SEQ ID NO: 6739 - RNA, 21 nt, Artificial Sequence
  Synthetic
auagagaucagagccaggcug

SEQ ID NO: 6740 - RNA, 21 nt, Artificial Sequence
  Synthetic
aucucuauguagagcacguug

SEQ ID NO: 6741 - RNA, 21 nt, Artificial Sequence
  Synthetic
caacgugcucuacauagagau

SEQ ID NO: 6742 - RNA, 21 nt, Artificial Sequence
  Synthetic
cagcagccuggcucugaucuc

SEQ ID NO: 6743 - RNA, 21 nt, Artificial Sequence
  Synthetic
cagccuggcucugaucucuau

SEQ ID NO: 6744 - RNA, 21 nt, Artificial Sequence
  Synthetic
cauagagaucagagccaggcu

SEQ ID NO: 6745 - RNA, 21 nt, Artificial Sequence
  Synthetic
ccuggcucugaucucuaugua

SEQ ID NO: 6746 - RNA, 21 nt, Artificial Sequence
  Synthetic
cgaggacaacgugcucuacau

SEQ ID NO: 6747 - RNA, 21 nt, Artificial Sequence
  Synthetic
cggcagcagccuggcucugau

SEQ ID NO: 6748 - RNA, 21 nt, Artificial Sequence
  Synthetic
cgugcucuacauagagaucag

SEQ ID NO: 6749 - RNA, 21 nt, Artificial Sequence
  Synthetic
cuacauagagaucagagccag

SEQ ID NO: 6750 - RNA, 21 nt, Artificial Sequence
  Synthetic
cuacgaggacaacgugcucua

SEQ ID NO: 6751 - RNA, 21 nt, Artificial Sequence
  Synthetic
cuauguagagcacguuguccu

SEQ ID NO: 6752 - RNA, 21 nt, Artificial Sequence
  Synthetic
cucuacauagagaucagagcc

SEQ ID NO: 6753 - RNA, 21 nt, Artificial Sequence
  Synthetic
cucuauguagagcacguuguc

SEQ ID NO: 6754 - RNA, 21 nt, Artificial Sequence
  Synthetic
cucugaucucuauguagagca

SEQ ID NO: 6755 - RNA, 21 nt, Artificial Sequence
  Synthetic
cugaucucuauguagagcacg

SEQ ID NO: 6756 - RNA, 21 nt, Artificial Sequence
  Synthetic
cuggcucugaucucuauguag

SEQ ID NO: 6757 - RNA, 21 nt, Artificial Sequence
  Synthetic
gacaacgugcucuacauagag

SEQ ID NO: 6758 - RNA, 21 nt, Artificial Sequence
  Synthetic
gaggacaacgugcucuacaua

SEQ ID NO: 6759 - RNA, 21 nt, Artificial Sequence
  Synthetic
gaucucuauguagagcacguu

SEQ ID NO: 6760 - RNA, 21 nt, Artificial Sequence
  Synthetic
gcagcagccuggcucugaucu

SEQ ID NO: 6761 - RNA, 21 nt, Artificial Sequence
  Synthetic
gcagccuggcucugaucucua

SEQ ID NO: 6762 - RNA, 21 nt, Artificial Sequence
  Synthetic
gccuggcucugaucucuaugu

SEQ ID NO: 6763 - RNA, 21 nt, Artificial Sequence
  Synthetic
gcucuacauagagaucagagc

SEQ ID NO: 6764 - RNA, 21 nt, Artificial Sequence
  Synthetic
gcucugaucucuauguagagc

SEQ ID NO: 6765 - RNA, 21 nt, Artificial Sequence
  Synthetic
ggacaacgugcucuacauaga

SEQ ID NO: 6766 - RNA, 21 nt, Artificial Sequence
  Synthetic
ggcagcagccuggcucugauc

SEQ ID NO: 6767 - RNA, 21 nt, Artificial Sequence
  Synthetic
ggcucugaucucuauguagag

SEQ ID NO: 6768 - RNA, 21 nt, Artificial Sequence
  Synthetic
gugcucuacauagagaucaga

SEQ ID NO: 6769 - RNA, 21 nt, Artificial Sequence
  Synthetic
uacauagagaucagagccagg

SEQ ID NO: 6770 - RNA, 21 nt, Artificial Sequence
  Synthetic
uacgaggacaacgugcucuac

SEQ ID NO: 6771 - RNA, 21 nt, Artificial Sequence
  Synthetic
uagagaucagagccaggcugc

SEQ ID NO: 6772 - RNA, 21 nt, Artificial Sequence
  Synthetic
ucuacauagagaucagagcca

SEQ ID NO: 6773 - RNA, 21 nt, Artificial Sequence
  Synthetic
ucuauguagagcacguugucc

SEQ ID NO: 6774 - RNA, 21 nt, Artificial Sequence
  Synthetic
ucucuauguagagcacguugu

SEQ ID NO: 6775 - RNA, 21 nt, Artificial Sequence
  Synthetic
ucugaucucuauguagagcac

SEQ ID NO: 6776 - RNA, 21 nt, Artificial Sequence
  Synthetic
ugaucucuauguagagcacgu

SEQ ID NO: 6777 - RNA, 21 nt, Artificial Sequence
  Synthetic
ugcucuacauagagaucagag

SEQ ID NO: 6778 - RNA, 21 nt, Artificial Sequence
  Synthetic
uggcucugaucucuauguaga

SEQ ID NO: 6779 - RNA, 22 nt, Artificial Sequence
  Synthetic
aacgugcucuacauagagauca

SEQ ID NO: 6780 - RNA, 22 nt, Artificial Sequence
  Synthetic
acaacgugcucuacauagagau

SEQ ID NO: 6781 - RNA, 22 nt, Artificial Sequence
  Synthetic
acauagagaucagagccaggcu

SEQ ID NO: 6782 - RNA, 22 nt, Artificial Sequence
  Synthetic
acgaggacaacgugcucuacau

SEQ ID NO: 6783 - RNA, 22 nt, Artificial Sequence
  Synthetic
acgugcucuacauagagaucag

SEQ ID NO: 6784 - RNA, 22 nt, Artificial Sequence
  Synthetic
agcagccuggcucugaucucua

SEQ ID NO: 6785 - RNA, 22 nt, Artificial Sequence
  Synthetic
agccuggcucugaucucuaugu

SEQ ID NO: 6786 - RNA, 22 nt, Artificial Sequence
  Synthetic
aggacaacgugcucuacauaga

SEQ ID NO: 6787 - RNA, 22 nt, Artificial Sequence
  Synthetic
auagagaucagagccaggcugc

SEQ ID NO: 6788 - RNA, 22 nt, Artificial Sequence
  Synthetic
aucucuauguagagcacguugu

SEQ ID NO: 6789 - RNA, 22 nt, Artificial Sequence
  Synthetic
caacgugcucuacauagagauc

SEQ ID NO: 6790 - RNA, 22 nt, Artificial Sequence
  Synthetic
cagcagccuggcucugaucucu

SEQ ID NO: 6791 - RNA, 22 nt, Artificial Sequence
  Synthetic
cagccuggcucugaucucuaug

SEQ ID NO: 6792 - RNA, 22 nt, Artificial Sequence
  Synthetic
cauagagaucagagccaggcug

SEQ ID NO: 6793 - RNA, 22 nt, Artificial Sequence
  Synthetic
ccggcagcagccuggcucugau

SEQ ID NO: 6794 - RNA, 22 nt, Artificial Sequence
  Synthetic
ccuggcucugaucucuauguag

SEQ ID NO: 6795 - RNA, 22 nt, Artificial Sequence
  Synthetic
cgaggacaacgugcucuacaua

SEQ ID NO: 6796 - RNA, 22 nt, Artificial Sequence
  Synthetic
cggcagcagccuggcucugauc

SEQ ID NO: 6797 - RNA, 22 nt, Artificial Sequence
  Synthetic
cgugcucuacauagagaucaga

SEQ ID NO: 6798 - RNA, 22 nt, Artificial Sequence
  Synthetic
cuacauagagaucagagccagg

SEQ ID NO: 6799 - RNA, 22 nt, Artificial Sequence
  Synthetic
cuacgaggacaacgugcucuac

SEQ ID NO: 6800 - RNA, 22 nt, Artificial Sequence
  Synthetic
cuauguagagcacguuguccuc

SEQ ID NO: 6801 - RNA, 22 nt, Artificial Sequence
  Synthetic
cucuacauagagaucagagcca

SEQ ID NO: 6802 - RNA, 22 nt, Artificial Sequence
  Synthetic
cucuauguagagcacguugucc

SEQ ID NO: 6803 - RNA, 22 nt, Artificial Sequence
  Synthetic
cucugaucucuauguagagcac

SEQ ID NO: 6804 - RNA, 22 nt, Artificial Sequence
  Synthetic
cugaucucuauguagagcacgu

SEQ ID NO: 6805 - RNA, 22 nt, Artificial Sequence
  Synthetic
cuggcucugaucucuauguaga

SEQ ID NO: 6806 - RNA, 22 nt, Artificial Sequence
  Synthetic
gacaacgugcucuacauagaga

SEQ ID NO: 6807 - RNA, 22 nt, Artificial Sequence
  Synthetic
gaggacaacgugcucuacauag

SEQ ID NO: 6808 - RNA, 22 nt, Artificial Sequence
  Synthetic
gaucucuauguagagcacguug

SEQ ID NO: 6809 - RNA, 22 nt, Artificial Sequence
  Synthetic
gcagcagccuggcucugaucuc

SEQ ID NO: 6810 - RNA, 22 nt, Artificial Sequence
  Synthetic
gcagccuggcucugaucucuau

SEQ ID NO: 6811 - RNA, 22 nt, Artificial Sequence
  Synthetic
gccuggcucugaucucuaugua

SEQ ID NO: 6812 - RNA, 22 nt, Artificial Sequence
  Synthetic
gcucuacauagagaucagagcc

SEQ ID NO: 6813 - RNA, 22 nt, Artificial Sequence
  Synthetic
gcucugaucucuauguagagca

SEQ ID NO: 6814 - RNA, 22 nt, Artificial Sequence
  Synthetic
ggacaacgugcucuacauagag

SEQ ID NO: 6815 - RNA, 22 nt, Artificial Sequence
  Synthetic
ggcagcagccuggcucugaucu

SEQ ID NO: 6816 - RNA, 22 nt, Artificial Sequence
  Synthetic
ggcucugaucucuauguagagc

SEQ ID NO: 6817 - RNA, 22 nt, Artificial Sequence
  Synthetic
gugcucuacauagagaucagag

SEQ ID NO: 6818 - RNA, 22 nt, Artificial Sequence
  Synthetic
uacauagagaucagagccaggc

SEQ ID NO: 6819 - RNA, 22 nt, Artificial Sequence
  Synthetic
uacgaggacaacgugcucuaca

SEQ ID NO: 6820 - RNA, 22 nt, Artificial Sequence
  Synthetic
uagagaucagagccaggcugcu

SEQ ID NO: 6821 - RNA, 22 nt, Artificial Sequence
  Synthetic
ucuacauagagaucagagccag

SEQ ID NO: 6822 - RNA, 22 nt, Artificial Sequence
  Synthetic
ucuacgaggacaacgugcucua

SEQ ID NO: 6823 - RNA, 22 nt, Artificial Sequence
  Synthetic
ucuauguagagcacguuguccu

SEQ ID NO: 6824 - RNA, 22 nt, Artificial Sequence
  Synthetic
ucucuauguagagcacguuguc

SEQ ID NO: 6825 - RNA, 22 nt, Artificial Sequence
  Synthetic
ucugaucucuauguagagcacg

SEQ ID NO: 6826 - RNA, 22 nt, Artificial Sequence
  Synthetic
ugaucucuauguagagcacguu

SEQ ID NO: 6827 - RNA, 22 nt, Artificial Sequence
  Synthetic
ugcucuacauagagaucagagc

SEQ ID NO: 6828 - RNA, 22 nt, Artificial Sequence
  Synthetic
uggcucugaucucuauguagag

SEQ ID NO: 6829 - RNA, 20 nt, Artificial Sequence
  Synthetic
aacgugcucuacagggagau

SEQ ID NO: 6830 - RNA, 20 nt, Artificial Sequence
  Synthetic
acaacgugcucuacagggag

SEQ ID NO: 6831 - RNA, 20 nt, Artificial Sequence
  Synthetic
acagggagaucagagccagg

SEQ ID NO: 6832 - RNA, 20 nt, Artificial Sequence
  Synthetic
acgugcucuacagggagauc

SEQ ID NO: 6833 - RNA, 20 nt, Artificial Sequence
  Synthetic
agccuggcucugaucucccu

SEQ ID NO: 6834 - RNA, 20 nt, Artificial Sequence
  Synthetic
aggacaacgugcucuacagg

SEQ ID NO: 6835 - RNA, 20 nt, Artificial Sequence
  Synthetic
agggagaucagagccaggcu

SEQ ID NO: 6836 - RNA, 20 nt, Artificial Sequence
  Synthetic
aucucccuguagagcacguu

SEQ ID NO: 6837 - RNA, 20 nt, Artificial Sequence
  Synthetic
caacgugcucuacagggaga

SEQ ID NO: 6838 - RNA, 20 nt, Artificial Sequence
  Synthetic
cagccuggcucugaucuccc

SEQ ID NO: 6839 - RNA, 20 nt, Artificial Sequence
  Synthetic
cagggagaucagagccaggc

SEQ ID NO: 6840 - RNA, 20 nt, Artificial Sequence
  Synthetic
cccuguagagcacguugucc

SEQ ID NO: 6841 - RNA, 20 nt, Artificial Sequence
  Synthetic
ccuggcucugaucucccugu

SEQ ID NO: 6842 - RNA, 20 nt, Artificial Sequence
  Synthetic
ccuguagagcacguuguccu

SEQ ID NO: 6843 - RNA, 20 nt, Artificial Sequence
  Synthetic
cgugcucuacagggagauca

SEQ ID NO: 6844 - RNA, 20 nt, Artificial Sequence
  Synthetic
cuacagggagaucagagcca

SEQ ID NO: 6845 - RNA, 20 nt, Artificial Sequence
  Synthetic
cuacgaggacaacgugcucu

SEQ ID NO: 6846 - RNA, 20 nt, Artificial Sequence
  Synthetic
cucccuguagagcacguugu

SEQ ID NO: 6847 - RNA, 20 nt, Artificial Sequence
  Synthetic
cucuacagggagaucagagc

SEQ ID NO: 6848 - RNA, 20 nt, Artificial Sequence
  Synthetic
cucugaucucccuguagagc

SEQ ID NO: 6849 - RNA, 20 nt, Artificial Sequence
  Synthetic
cugaucucccuguagagcac

SEQ ID NO: 6850 - RNA, 20 nt, Artificial Sequence
  Synthetic
cuggcucugaucucccugua

SEQ ID NO: 6851 - RNA, 20 nt, Artificial Sequence
  Synthetic
gacaacgugcucuacaggga

SEQ ID NO: 6852 - RNA, 20 nt, Artificial Sequence
  Synthetic
gaggacaacgugcucuacag

SEQ ID NO: 6853 - RNA, 20 nt, Artificial Sequence
  Synthetic
gaucucccuguagagcacgu

SEQ ID NO: 6854 - RNA, 20 nt, Artificial Sequence
  Synthetic
gcagccuggcucugaucucc

SEQ ID NO: 6855 - RNA, 20 nt, Artificial Sequence
  Synthetic
gccuggcucugaucucccug

SEQ ID NO: 6856 - RNA, 20 nt, Artificial Sequence
  Synthetic
gcucuacagggagaucagag

SEQ ID NO: 6857 - RNA, 20 nt, Artificial Sequence
  Synthetic
gcucugaucucccuguagag

SEQ ID NO: 6858 - RNA, 20 nt, Artificial Sequence
  Synthetic
ggacaacgugcucuacaggg

SEQ ID NO: 6859 - RNA, 20 nt, Artificial Sequence
  Synthetic
ggcucugaucucccuguaga

SEQ ID NO: 6860 - RNA, 20 nt, Artificial Sequence
  Synthetic
gugcucuacagggagaucag

SEQ ID NO: 6861 - RNA, 20 nt, Artificial Sequence
  Synthetic
uacagggagaucagagccag

SEQ ID NO: 6862 - RNA, 20 nt, Artificial Sequence
  Synthetic
ucccuguagagcacguuguc

SEQ ID NO: 6863 - RNA, 20 nt, Artificial Sequence
  Synthetic
ucuacagggagaucagagcc

SEQ ID NO: 6864 - RNA, 20 nt, Artificial Sequence
  Synthetic
ucucccuguagagcacguug

SEQ ID NO: 6865 - RNA, 20 nt, Artificial Sequence
  Synthetic
ucugaucucccuguagagca

SEQ ID NO: 6866 - RNA, 20 nt, Artificial Sequence
  Synthetic
ugaucucccuguagagcacg

SEQ ID NO: 6867 - RNA, 20 nt, Artificial Sequence
  Synthetic
ugcucuacagggagaucaga

SEQ ID NO: 6868 - RNA, 20 nt, Artificial Sequence
  Synthetic
uggcucugaucucccuguag

SEQ ID NO: 6869 - RNA, 21 nt, Artificial Sequence
  Synthetic
aacgugcucuacagggagauc

SEQ ID NO: 6870 - RNA, 21 nt, Artificial Sequence
  Synthetic
acaacgugcucuacagggaga

SEQ ID NO: 6871 - RNA, 21 nt, Artificial Sequence
  Synthetic
acagggagaucagagccaggc

SEQ ID NO: 6872 - RNA, 21 nt, Artificial Sequence
  Synthetic
acgugcucuacagggagauca

SEQ ID NO: 6873 - RNA, 21 nt, Artificial Sequence
  Synthetic
agcagccuggcucugaucucc

SEQ ID NO: 6874 - RNA, 21 nt, Artificial Sequence
  Synthetic
agccuggcucugaucucccug

SEQ ID NO: 6875 - RNA, 21 nt, Artificial Sequence
  Synthetic
aggacaacgugcucuacaggg

SEQ ID NO: 6876 - RNA, 21 nt, Artificial Sequence
  Synthetic
agggagaucagagccaggcug

SEQ ID NO: 6877 - RNA, 21 nt, Artificial Sequence
  Synthetic
aucucccuguagagcacguug

SEQ ID NO: 6878 - RNA, 21 nt, Artificial Sequence
  Synthetic
caacgugcucuacagggagau

SEQ ID NO: 6879 - RNA, 21 nt, Artificial Sequence
  Synthetic
cagccuggcucugaucucccu

SEQ ID NO: 6880 - RNA, 21 nt, Artificial Sequence
  Synthetic
cagggagaucagagccaggcu

SEQ ID NO: 6881 - RNA, 21 nt, Artificial Sequence
  Synthetic
cccuguagagcacguuguccu

SEQ ID NO: 6882 - RNA, 21 nt, Artificial Sequence
  Synthetic
ccuggcucugaucucccugua

SEQ ID NO: 6883 - RNA, 21 nt, Artificial Sequence
  Synthetic
ccuguagagcacguuguccuc

SEQ ID NO: 6884 - RNA, 21 nt, Artificial Sequence
  Synthetic
cgaggacaacgugcucuacag

SEQ ID NO: 6885 - RNA, 21 nt, Artificial Sequence
  Synthetic
cgugcucuacagggagaucag

SEQ ID NO: 6886 - RNA, 21 nt, Artificial Sequence
  Synthetic
cuacagggagaucagagccag

SEQ ID NO: 6887 - RNA, 21 nt, Artificial Sequence
  Synthetic
cucccuguagagcacguuguc

SEQ ID NO: 6888 - RNA, 21 nt, Artificial Sequence
  Synthetic
cucuacagggagaucagagcc

SEQ ID NO: 6889 - RNA, 21 nt, Artificial Sequence
  Synthetic
cucugaucucccuguagagca

SEQ ID NO: 6890 - RNA, 21 nt, Artificial Sequence
  Synthetic
cugaucucccuguagagcacg

SEQ ID NO: 6891 - RNA, 21 nt, Artificial Sequence
  Synthetic
cuggcucugaucucccuguag

SEQ ID NO: 6892 - RNA, 21 nt, Artificial Sequence
  Synthetic
gacaacgugcucuacagggag

SEQ ID NO: 6893 - RNA, 21 nt, Artificial Sequence
  Synthetic
gaggacaacgugcucuacagg

SEQ ID NO: 6894 - RNA, 21 nt, Artificial Sequence
  Synthetic
gaucucccuguagagcacguu

SEQ ID NO: 6895 - RNA, 21 nt, Artificial Sequence
  Synthetic
gcagccuggcucugaucuccc

SEQ ID NO: 6896 - RNA, 21 nt, Artificial Sequence
  Synthetic
gccuggcucugaucucccugu

SEQ ID NO: 6897 - RNA, 21 nt, Artificial Sequence
  Synthetic
gcucuacagggagaucagagc

SEQ ID NO: 6898 - RNA, 21 nt, Artificial Sequence
  Synthetic
gcucugaucucccuguagagc

SEQ ID NO: 6899 - RNA, 21 nt, Artificial Sequence
  Synthetic
ggacaacgugcucuacaggga

SEQ ID NO: 6900 - RNA, 21 nt, Artificial Sequence
  Synthetic
ggcucugaucucccuguagag

SEQ ID NO: 6901 - RNA, 21 nt, Artificial Sequence
  Synthetic
gugcucuacagggagaucaga

SEQ ID NO: 6902 - RNA, 21 nt, Artificial Sequence
  Synthetic
uacagggagaucagagccagg

SEQ ID NO: 6903 - RNA, 21 nt, Artificial Sequence
  Synthetic
ucccuguagagcacguugucc

SEQ ID NO: 6904 - RNA, 21 nt, Artificial Sequence
  Synthetic
ucuacagggagaucagagcca

SEQ ID NO: 6905 - RNA, 21 nt, Artificial Sequence
  Synthetic
ucuacgaggacaacgugcucu

SEQ ID NO: 6906 - RNA, 21 nt, Artificial Sequence
  Synthetic
ucucccuguagagcacguugu

SEQ ID NO: 6907 - RNA, 21 nt, Artificial Sequence
  Synthetic
ucugaucucccuguagagcac

SEQ ID NO: 6908 - RNA, 21 nt, Artificial Sequence
  Synthetic
ugaucucccuguagagcacgu

SEQ ID NO: 6909 - RNA, 21 nt, Artificial Sequence
  Synthetic
ugcucuacagggagaucagag

SEQ ID NO: 6910 - RNA, 21 nt, Artificial Sequence
  Synthetic
uggcucugaucucccuguaga

SEQ ID NO: 6911 - RNA, 22 nt, Artificial Sequence
  Synthetic
aacgugcucuacagggagauca

SEQ ID NO: 6912 - RNA, 22 nt, Artificial Sequence
  Synthetic
acaacgugcucuacagggagau

SEQ ID NO: 6913 - RNA, 22 nt, Artificial Sequence
  Synthetic
acagggagaucagagccaggcu

SEQ ID NO: 6914 - RNA, 22 nt, Artificial Sequence
  Synthetic
acgaggacaacgugcucuacag

SEQ ID NO: 6915 - RNA, 22 nt, Artificial Sequence
  Synthetic
acgugcucuacagggagaucag

SEQ ID NO: 6916 - RNA, 22 nt, Artificial Sequence
  Synthetic
agcagccuggcucugaucuccc

SEQ ID NO: 6917 - RNA, 22 nt, Artificial Sequence
  Synthetic
agccuggcucugaucucccugu

SEQ ID NO: 6918 - RNA, 22 nt, Artificial Sequence
  Synthetic
aggacaacgugcucuacaggga

SEQ ID NO: 6919 - RNA, 22 nt, Artificial Sequence
  Synthetic
agggagaucagagccaggcugc

SEQ ID NO: 6920 - RNA, 22 nt, Artificial Sequence
  Synthetic
aucucccuguagagcacguugu

SEQ ID NO: 6921 - RNA, 22 nt, Artificial Sequence
  Synthetic
caacgugcucuacagggagauc

SEQ ID NO: 6922 - RNA, 22 nt, Artificial Sequence
  Synthetic
cagcagccuggcucugaucucc

SEQ ID NO: 6923 - RNA, 22 nt, Artificial Sequence
  Synthetic
cagccuggcucugaucucccug

SEQ ID NO: 6924 - RNA, 22 nt, Artificial Sequence
  Synthetic
cagggagaucagagccaggcug

SEQ ID NO: 6925 - RNA, 22 nt, Artificial Sequence
  Synthetic
cccuguagagcacguuguccuc

SEQ ID NO: 6926 - RNA, 22 nt, Artificial Sequence
  Synthetic
ccuggcucugaucucccuguag

SEQ ID NO: 6927 - RNA, 22 nt, Artificial Sequence
  Synthetic
ccuguagagcacguuguccucg

SEQ ID NO: 6928 - RNA, 22 nt, Artificial Sequence
  Synthetic
cgaggacaacgugcucuacagg

SEQ ID NO: 6929 - RNA, 22 nt, Artificial Sequence
  Synthetic
cgugcucuacagggagaucaga

SEQ ID NO: 6930 - RNA, 22 nt, Artificial Sequence
  Synthetic
cuacagggagaucagagccagg

SEQ ID NO: 6931 - RNA, 22 nt, Artificial Sequence
  Synthetic
cucccuguagagcacguugucc

SEQ ID NO: 6932 - RNA, 22 nt, Artificial Sequence
  Synthetic
cucuacagggagaucagagcca

SEQ ID NO: 6933 - RNA, 22 nt, Artificial Sequence
  Synthetic
cucugaucucccuguagagcac

SEQ ID NO: 6934 - RNA, 22 nt, Artificial Sequence
  Synthetic
cugaucucccuguagagcacgu

SEQ ID NO: 6935 - RNA, 22 nt, Artificial Sequence
  Synthetic
cuggcucugaucucccuguaga

SEQ ID NO: 6936 - RNA, 22 nt, Artificial Sequence
  Synthetic
gacaacgugcucuacagggaga

SEQ ID NO: 6937 - RNA, 22 nt, Artificial Sequence
  Synthetic
gaggacaacgugcucuacaggg

SEQ ID NO: 6938 - RNA, 22 nt, Artificial Sequence
  Synthetic
gaucucccuguagagcacguug

SEQ ID NO: 6939 - RNA, 22 nt, Artificial Sequence
  Synthetic
gcagccuggcucugaucucccu

SEQ ID NO: 6940 - RNA, 22 nt, Artificial Sequence
  Synthetic
gccuggcucugaucucccugua

SEQ ID NO: 6941 - RNA, 22 nt, Artificial Sequence
  Synthetic
gcucuacagggagaucagagcc

SEQ ID NO: 6942 - RNA, 22 nt, Artificial Sequence
  Synthetic
gcucugaucucccuguagagca

SEQ ID NO: 6943 - RNA, 22 nt, Artificial Sequence
  Synthetic
ggacaacgugcucuacagggag

SEQ ID NO: 6944 - RNA, 22 nt, Artificial Sequence
  Synthetic
ggcucugaucucccuguagagc

SEQ ID NO: 6945 - RNA, 22 nt, Artificial Sequence
  Synthetic
gugcucuacagggagaucagag

SEQ ID NO: 6946 - RNA, 22 nt, Artificial Sequence
  Synthetic
uacagggagaucagagccaggc

SEQ ID NO: 6947 - RNA, 22 nt, Artificial Sequence
  Synthetic
ucccuguagagcacguuguccu

SEQ ID NO: 6948 - RNA, 22 nt, Artificial Sequence
  Synthetic
ucuacagggagaucagagccag

SEQ ID NO: 6949 - RNA, 22 nt, Artificial Sequence
  Synthetic
ucucccuguagagcacguuguc

SEQ ID NO: 6950 - RNA, 22 nt, Artificial Sequence
  Synthetic
ucugaucucccuguagagcacg

SEQ ID NO: 6951 - RNA, 22 nt, Artificial Sequence
  Synthetic
ugaucucccuguagagcacguu

SEQ ID NO: 6952 - RNA, 22 nt, Artificial Sequence
  Synthetic
ugcucuacagggagaucagagc

SEQ ID NO: 6953 - RNA, 22 nt, Artificial Sequence
  Synthetic
uggcucugaucucccuguagag

SEQ ID NO: 6954 - RNA, 22 nt, Artificial Sequence
  Synthetic
uucuacgaggacaacgugcucu

SEQ ID NO: 6955 - RNA, 20 nt, Artificial Sequence
  Synthetic
acgagaacaacgugcucuac

SEQ ID NO: 6956 - RNA, 20 nt, Artificial Sequence
  Synthetic
acguuguucucguagaacuc

SEQ ID NO: 6957 - RNA, 20 nt, Artificial Sequence
  Synthetic
agaacaacgugcucuacaug

SEQ ID NO: 6958 - RNA, 20 nt, Artificial Sequence
  Synthetic
agagcacguuguucucguag

SEQ ID NO: 6959 - RNA, 20 nt, Artificial Sequence
  Synthetic
agcacguuguucucguagaa

SEQ ID NO: 6960 - RNA, 20 nt, Artificial Sequence
  Synthetic
agcaugcaggaguucuacga

SEQ ID NO: 6961 - RNA, 20 nt, Artificial Sequence
  Synthetic
aggaguucuacgagaacaac

SEQ ID NO: 6962 - RNA, 20 nt, Artificial Sequence
  Synthetic
aguucuacgagaacaacgug

SEQ ID NO: 6963 - RNA, 20 nt, Artificial Sequence
  Synthetic
aucuccauguagagcacguu

SEQ ID NO: 6964 - RNA, 20 nt, Artificial Sequence
  Synthetic
augcaggaguucuacgagaa

SEQ ID NO: 6965 - RNA, 20 nt, Artificial Sequence
  Synthetic
auguagagcacguuguucuc

SEQ ID NO: 6966 - RNA, 20 nt, Artificial Sequence
  Synthetic
cacguuguucucguagaacu

SEQ ID NO: 6967 - RNA, 20 nt, Artificial Sequence
  Synthetic
caggaguucuacgagaacaa

SEQ ID NO: 6968 - RNA, 20 nt, Artificial Sequence
  Synthetic
caugcaggaguucuacgaga

SEQ ID NO: 6969 - RNA, 20 nt, Artificial Sequence
  Synthetic
cauguagagcacguuguucu

SEQ ID NO: 6970 - RNA, 20 nt, Artificial Sequence
  Synthetic
ccauguagagcacguuguuc

SEQ ID NO: 6971 - RNA, 20 nt, Artificial Sequence
  Synthetic
cgagaacaacgugcucuaca

SEQ ID NO: 6972 - RNA, 20 nt, Artificial Sequence
  Synthetic
cguuguucucguagaacucc

SEQ ID NO: 6973 - RNA, 20 nt, Artificial Sequence
  Synthetic
cuacgagaacaacgugcucu

SEQ ID NO: 6974 - RNA, 20 nt, Artificial Sequence
  Synthetic
cuccauguagagcacguugu

SEQ ID NO: 6975 - RNA, 20 nt, Artificial Sequence
  Synthetic
gaacaacgugcucuacaugg

SEQ ID NO: 6976 - RNA, 20 nt, Artificial Sequence
  Synthetic
gagaacaacgugcucuacau

SEQ ID NO: 6977 - RNA, 20 nt, Artificial Sequence
  Synthetic
gagcacguuguucucguaga

SEQ ID NO: 6978 - RNA, 20 nt, Artificial Sequence
  Synthetic
gagcaugcaggaguucuacg

SEQ ID NO: 6979 - RNA, 20 nt, Artificial Sequence
  Synthetic
gaguucuacgagaacaacgu

SEQ ID NO: 6980 - RNA, 20 nt, Artificial Sequence
  Synthetic
gaucuccauguagagcacgu

SEQ ID NO: 6981 - RNA, 20 nt, Artificial Sequence
  Synthetic
gcacguuguucucguagaac

SEQ ID NO: 6982 - RNA, 20 nt, Artificial Sequence
  Synthetic
gcaggaguucuacgagaaca

SEQ ID NO: 6983 - RNA, 20 nt, Artificial Sequence
  Synthetic
gcaugcaggaguucuacgag

SEQ ID NO: 6984 - RNA, 20 nt, Artificial Sequence
  Synthetic
ggagcaugcaggaguucuac

SEQ ID NO: 6985 - RNA, 20 nt, Artificial Sequence
  Synthetic
ggaguucuacgagaacaacg

SEQ ID NO: 6986 - RNA, 20 nt, Artificial Sequence
  Synthetic
guagagcacguuguucucgu

SEQ ID NO: 6987 - RNA, 20 nt, Artificial Sequence
  Synthetic
guucuacgagaacaacgugc

SEQ ID NO: 6988 - RNA, 20 nt, Artificial Sequence
  Synthetic
guucucguagaacuccugca

SEQ ID NO: 6989 - RNA, 20 nt, Artificial Sequence
  Synthetic
guuguucucguagaacuccu

SEQ ID NO: 6990 - RNA, 20 nt, Artificial Sequence
  Synthetic
uacgagaacaacgugcucua

SEQ ID NO: 6991 - RNA, 20 nt, Artificial Sequence
  Synthetic
uagagcacguuguucucgua

SEQ ID NO: 6992 - RNA, 20 nt, Artificial Sequence
  Synthetic
uccauguagagcacguuguu

SEQ ID NO: 6993 - RNA, 20 nt, Artificial Sequence
  Synthetic
ucuacgagaacaacgugcuc

SEQ ID NO: 6994 - RNA, 20 nt, Artificial Sequence
  Synthetic
ucuccauguagagcacguug

SEQ ID NO: 6995 - RNA, 20 nt, Artificial Sequence
  Synthetic
ugcaggaguucuacgagaac

SEQ ID NO: 6996 - RNA, 20 nt, Artificial Sequence
  Synthetic
uguagagcacguuguucucg

SEQ ID NO: 6997 - RNA, 20 nt, Artificial Sequence
  Synthetic
uguucucguagaacuccugc

SEQ ID NO: 6998 - RNA, 20 nt, Artificial Sequence
  Synthetic
uucuacgagaacaacgugcu

SEQ ID NO: 6999 - RNA, 20 nt, Artificial Sequence
  Synthetic
uucucguagaacuccugcau

SEQ ID NO: 7000 - RNA, 20 nt, Artificial Sequence
  Synthetic
uuguucucguagaacuccug

SEQ ID NO: 7001 - RNA, 21 nt, Artificial Sequence
  Synthetic
acgagaacaacgugcucuaca

SEQ ID NO: 7002 - RNA, 21 nt, Artificial Sequence
  Synthetic
acguuguucucguagaacucc

SEQ ID NO: 7003 - RNA, 21 nt, Artificial Sequence
  Synthetic
agaacaacgugcucuacaugg

SEQ ID NO: 7004 - RNA, 21 nt, Artificial Sequence
  Synthetic
agagcacguuguucucguaga

SEQ ID NO: 7005 - RNA, 21 nt, Artificial Sequence
  Synthetic
agcacguuguucucguagaac

SEQ ID NO: 7006 - RNA, 21 nt, Artificial Sequence
  Synthetic
agcaugcaggaguucuacgag

SEQ ID NO: 7007 - RNA, 21 nt, Artificial Sequence
  Synthetic
aggaguucuacgagaacaacg

SEQ ID NO: 7008 - RNA, 21 nt, Artificial Sequence
  Synthetic
aguucuacgagaacaacgugc

SEQ ID NO: 7009 - RNA, 21 nt, Artificial Sequence
  Synthetic
aucuccauguagagcacguug

SEQ ID NO: 7010 - RNA, 21 nt, Artificial Sequence
  Synthetic
augcaggaguucuacgagaac

SEQ ID NO: 7011 - RNA, 21 nt, Artificial Sequence
  Synthetic
auguagagcacguuguucucg

SEQ ID NO: 7012 - RNA, 21 nt, Artificial Sequence
  Synthetic
cacguuguucucguagaacuc

SEQ ID NO: 7013 - RNA, 21 nt, Artificial Sequence
  Synthetic
caggaguucuacgagaacaac

SEQ ID NO: 7014 - RNA, 21 nt, Artificial Sequence
  Synthetic
caugcaggaguucuacgagaa

SEQ ID NO: 7015 - RNA, 21 nt, Artificial Sequence
  Synthetic
cauguagagcacguuguucuc

SEQ ID NO: 7016 - RNA, 21 nt, Artificial Sequence
  Synthetic
ccauguagagcacguuguucu

SEQ ID NO: 7017 - RNA, 21 nt, Artificial Sequence
  Synthetic
cgagaacaacgugcucuacau

SEQ ID NO: 7018 - RNA, 21 nt, Artificial Sequence
  Synthetic
cggagcaugcaggaguucuac

SEQ ID NO: 7019 - RNA, 21 nt, Artificial Sequence
  Synthetic
cguuguucucguagaacuccu

SEQ ID NO: 7020 - RNA, 21 nt, Artificial Sequence
  Synthetic
cuacgagaacaacgugcucua

SEQ ID NO: 7021 - RNA, 21 nt, Artificial Sequence
  Synthetic
cuccauguagagcacguuguu

SEQ ID NO: 7022 - RNA, 21 nt, Artificial Sequence
  Synthetic
gaacaacgugcucuacaugga

SEQ ID NO: 7023 - RNA, 21 nt, Artificial Sequence
  Synthetic
gagaacaacgugcucuacaug

SEQ ID NO: 7024 - RNA, 21 nt, Artificial Sequence
  Synthetic
gagcacguuguucucguagaa

SEQ ID NO: 7025 - RNA, 21 nt, Artificial Sequence
  Synthetic
gagcaugcaggaguucuacga

SEQ ID NO: 7026 - RNA, 21 nt, Artificial Sequence
  Synthetic
gaguucuacgagaacaacgug

SEQ ID NO: 7027 - RNA, 21 nt, Artificial Sequence
  Synthetic
gaucuccauguagagcacguu

SEQ ID NO: 7028 - RNA, 21 nt, Artificial Sequence
  Synthetic
gcacguuguucucguagaacu

SEQ ID NO: 7029 - RNA, 21 nt, Artificial Sequence
  Synthetic
gcaggaguucuacgagaacaa

SEQ ID NO: 7030 - RNA, 21 nt, Artificial Sequence
  Synthetic
gcaugcaggaguucuacgaga

SEQ ID NO: 7031 - RNA, 21 nt, Artificial Sequence
  Synthetic
ggagcaugcaggaguucuacg

SEQ ID NO: 7032 - RNA, 21 nt, Artificial Sequence
  Synthetic
ggaguucuacgagaacaacgu

SEQ ID NO: 7033 - RNA, 21 nt, Artificial Sequence
  Synthetic
guagagcacguuguucucgua

SEQ ID NO: 7034 - RNA, 21 nt, Artificial Sequence
  Synthetic
guucuacgagaacaacgugcu

SEQ ID NO: 7035 - RNA, 21 nt, Artificial Sequence
  Synthetic
guucucguagaacuccugcau

SEQ ID NO: 7036 - RNA, 21 nt, Artificial Sequence
  Synthetic
guuguucucguagaacuccug

SEQ ID NO: 7037 - RNA, 21 nt, Artificial Sequence
  Synthetic
uacgagaacaacgugcucuac

SEQ ID NO: 7038 - RNA, 21 nt, Artificial Sequence
  Synthetic
uagagcacguuguucucguag

SEQ ID NO: 7039 - RNA, 21 nt, Artificial Sequence
  Synthetic
uccauguagagcacguuguuc

SEQ ID NO: 7040 - RNA, 21 nt, Artificial Sequence
  Synthetic
ucuacgagaacaacgugcucu

SEQ ID NO: 7041 - RNA, 21 nt, Artificial Sequence
  Synthetic
ucuccauguagagcacguugu

SEQ ID NO: 7042 - RNA, 21 nt, Artificial Sequence
  Synthetic
ugaucuccauguagagcacgu

SEQ ID NO: 7043 - RNA, 21 nt, Artificial Sequence
  Synthetic
ugcaggaguucuacgagaaca

SEQ ID NO: 7044 - RNA, 21 nt, Artificial Sequence
  Synthetic
uguagagcacguuguucucgu

SEQ ID NO: 7045 - RNA, 21 nt, Artificial Sequence
  Synthetic
uguucucguagaacuccugca

SEQ ID NO: 7046 - RNA, 21 nt, Artificial Sequence
  Synthetic
uucuacgagaacaacgugcuc

SEQ ID NO: 7047 - RNA, 21 nt, Artificial Sequence
  Synthetic
uucucguagaacuccugcaug

SEQ ID NO: 7048 - RNA, 21 nt, Artificial Sequence
  Synthetic
uuguucucguagaacuccugc

SEQ ID NO: 7049 - RNA, 22 nt, Artificial Sequence
  Synthetic
acgagaacaacgugcucuacau

SEQ ID NO: 7050 - RNA, 22 nt, Artificial Sequence
  Synthetic
acguuguucucguagaacuccu

SEQ ID NO: 7051 - RNA, 22 nt, Artificial Sequence
  Synthetic
agaacaacgugcucuacaugga

SEQ ID NO: 7052 - RNA, 22 nt, Artificial Sequence
  Synthetic
agagcacguuguucucguagaa

SEQ ID NO: 7053 - RNA, 22 nt, Artificial Sequence
  Synthetic
agcacguuguucucguagaacu

SEQ ID NO: 7054 - RNA, 22 nt, Artificial Sequence
  Synthetic
agcaugcaggaguucuacgaga

SEQ ID NO: 7055 - RNA, 22 nt, Artificial Sequence
  Synthetic
aggaguucuacgagaacaacgu

SEQ ID NO: 7056 - RNA, 22 nt, Artificial Sequence
  Synthetic
aguucuacgagaacaacgugcu

SEQ ID NO: 7057 - RNA, 22 nt, Artificial Sequence
  Synthetic
aucuccauguagagcacguugu

SEQ ID NO: 7058 - RNA, 22 nt, Artificial Sequence
  Synthetic
augcaggaguucuacgagaaca

SEQ ID NO: 7059 - RNA, 22 nt, Artificial Sequence
  Synthetic
auguagagcacguuguucucgu

SEQ ID NO: 7060 - RNA, 22 nt, Artificial Sequence
  Synthetic
cacguuguucucguagaacucc

SEQ ID NO: 7061 - RNA, 22 nt, Artificial Sequence
  Synthetic
caggaguucuacgagaacaacg

SEQ ID NO: 7062 - RNA, 22 nt, Artificial Sequence
  Synthetic
caugcaggaguucuacgagaac

SEQ ID NO: 7063 - RNA, 22 nt, Artificial Sequence
  Synthetic
cauguagagcacguuguucucg

SEQ ID NO: 7064 - RNA, 22 nt, Artificial Sequence
  Synthetic
ccauguagagcacguuguucuc

SEQ ID NO: 7065 - RNA, 22 nt, Artificial Sequence
  Synthetic
ccggagcaugcaggaguucuac

SEQ ID NO: 7066 - RNA, 22 nt, Artificial Sequence
  Synthetic
cgagaacaacgugcucuacaug

SEQ ID NO: 7067 - RNA, 22 nt, Artificial Sequence
  Synthetic
cggagcaugcaggaguucuacg

SEQ ID NO: 7068 - RNA, 22 nt, Artificial Sequence
  Synthetic
cguuguucucguagaacuccug

SEQ ID NO: 7069 - RNA, 22 nt, Artificial Sequence
  Synthetic
cuacgagaacaacgugcucuac

SEQ ID NO: 7070 - RNA, 22 nt, Artificial Sequence
  Synthetic
cuccauguagagcacguuguuc

SEQ ID NO: 7071 - RNA, 22 nt, Artificial Sequence
  Synthetic
cugaucuccauguagagcacgu

SEQ ID NO: 7072 - RNA, 22 nt, Artificial Sequence
  Synthetic
gaacaacgugcucuacauggag

SEQ ID NO: 7073 - RNA, 22 nt, Artificial Sequence
  Synthetic
gagaacaacgugcucuacaugg

SEQ ID NO: 7074 - RNA, 22 nt, Artificial Sequence
  Synthetic
gagcacguuguucucguagaac

SEQ ID NO: 7075 - RNA, 22 nt, Artificial Sequence
  Synthetic
gagcaugcaggaguucuacgag

SEQ ID NO: 7076 - RNA, 22 nt, Artificial Sequence
  Synthetic
gaguucuacgagaacaacgugc

SEQ ID NO: 7077 - RNA, 22 nt, Artificial Sequence
  Synthetic
gaucuccauguagagcacguug

SEQ ID NO: 7078 - RNA, 22 nt, Artificial Sequence
  Synthetic
gcacguuguucucguagaacuc

SEQ ID NO: 7079 - RNA, 22 nt, Artificial Sequence
  Synthetic
gcaggaguucuacgagaacaac

SEQ ID NO: 7080 - RNA, 22 nt, Artificial Sequence
  Synthetic
gcaugcaggaguucuacgagaa

SEQ ID NO: 7081 - RNA, 22 nt, Artificial Sequence
  Synthetic
ggagcaugcaggaguucuacga

SEQ ID NO: 7082 - RNA, 22 nt, Artificial Sequence
  Synthetic
ggaguucuacgagaacaacgug

SEQ ID NO: 7083 - RNA, 22 nt, Artificial Sequence
  Synthetic
guagagcacguuguucucguag

SEQ ID NO: 7084 - RNA, 22 nt, Artificial Sequence
  Synthetic
guucuacgagaacaacgugcuc

SEQ ID NO: 7085 - RNA, 22 nt, Artificial Sequence
  Synthetic
guucucguagaacuccugcaug

SEQ ID NO: 7086 - RNA, 22 nt, Artificial Sequence
  Synthetic
guuguucucguagaacuccugc

SEQ ID NO: 7087 - RNA, 22 nt, Artificial Sequence
  Synthetic
uacgagaacaacgugcucuaca

SEQ ID NO: 7088 - RNA, 22 nt, Artificial Sequence
  Synthetic
uagagcacguuguucucguaga

SEQ ID NO: 7089 - RNA, 22 nt, Artificial Sequence
  Synthetic
uccauguagagcacguuguucu

SEQ ID NO: 7090 - RNA, 22 nt, Artificial Sequence
  Synthetic
ucuacgagaacaacgugcucua

SEQ ID NO: 7091 - RNA, 22 nt, Artificial Sequence
  Synthetic
ucuccauguagagcacguuguu

SEQ ID NO: 7092 - RNA, 22 nt, Artificial Sequence
  Synthetic
ugaucuccauguagagcacguu

SEQ ID NO: 7093 - RNA, 22 nt, Artificial Sequence
  Synthetic
ugcaggaguucuacgagaacaa

SEQ ID NO: 7094 - RNA, 22 nt, Artificial Sequence
  Synthetic
uguagagcacguuguucucgua

SEQ ID NO: 7095 - RNA, 22 nt, Artificial Sequence
  Synthetic
uguucucguagaacuccugcau

SEQ ID NO: 7096 - RNA, 22 nt, Artificial Sequence
  Synthetic
uucuacgagaacaacgugcucu

SEQ ID NO: 7097 - RNA, 22 nt, Artificial Sequence
  Synthetic
uucucguagaacuccugcaugc

SEQ ID NO: 7098 - RNA, 22 nt, Artificial Sequence
  Synthetic
uuguucucguagaacuccugca

SEQ ID NO: 7099 - RNA, 20 nt, Artificial Sequence
  Synthetic
acguuguccucgaacuccug

SEQ ID NO: 7100 - RNA, 20 nt, Artificial Sequence
  Synthetic
agagcacguuguccucgaac

SEQ ID NO: 7101 - RNA, 20 nt, Artificial Sequence
  Synthetic
agcacguuguccucgaacuc

SEQ ID NO: 7102 - RNA, 20 nt, Artificial Sequence
  Synthetic
agcaugcaggaguucgagga

SEQ ID NO: 7103 - RNA, 20 nt, Artificial Sequence
  Synthetic
aggaguucgaggacaacgug

SEQ ID NO: 7104 - RNA, 20 nt, Artificial Sequence
  Synthetic
aguucgaggacaacgugcuc

SEQ ID NO: 7105 - RNA, 20 nt, Artificial Sequence
  Synthetic
augcaggaguucgaggacaa

SEQ ID NO: 7106 - RNA, 20 nt, Artificial Sequence
  Synthetic
auguagagcacguuguccuc

SEQ ID NO: 7107 - RNA, 20 nt, Artificial Sequence
  Synthetic
cacguuguccucgaacuccu

SEQ ID NO: 7108 - RNA, 20 nt, Artificial Sequence
  Synthetic
caggaguucgaggacaacgu

SEQ ID NO: 7109 - RNA, 20 nt, Artificial Sequence
  Synthetic
caugcaggaguucgaggaca

SEQ ID NO: 7110 - RNA, 20 nt, Artificial Sequence
  Synthetic
cauguagagcacguuguccu

SEQ ID NO: 7111 - RNA, 20 nt, Artificial Sequence
  Synthetic
ccauguagagcacguugucc

SEQ ID NO: 7112 - RNA, 20 nt, Artificial Sequence
  Synthetic
ccggagcaugcaggaguucg

SEQ ID NO: 7113 - RNA, 20 nt, Artificial Sequence
  Synthetic
ccucgaacuccugcaugcuc

SEQ ID NO: 7114 - RNA, 20 nt, Artificial Sequence
  Synthetic
cggagcaugcaggaguucga

SEQ ID NO: 7115 - RNA, 20 nt, Artificial Sequence
  Synthetic
cguuguccucgaacuccugc

SEQ ID NO: 7116 - RNA, 20 nt, Artificial Sequence
  Synthetic
cucgaacuccugcaugcucc

SEQ ID NO: 7117 - RNA, 20 nt, Artificial Sequence
  Synthetic
cuuccggagcaugcaggagu

SEQ ID NO: 7118 - RNA, 20 nt, Artificial Sequence
  Synthetic
gagcacguuguccucgaacu

SEQ ID NO: 7119 - RNA, 20 nt, Artificial Sequence
  Synthetic
gagcaugcaggaguucgagg

SEQ ID NO: 7120 - RNA, 20 nt, Artificial Sequence
  Synthetic
gaguucgaggacaacgugcu

SEQ ID NO: 7121 - RNA, 20 nt, Artificial Sequence
  Synthetic
gcacguuguccucgaacucc

SEQ ID NO: 7122 - RNA, 20 nt, Artificial Sequence
  Synthetic
gcaggaguucgaggacaacg

SEQ ID NO: 7123 - RNA, 20 nt, Artificial Sequence
  Synthetic
gcaugcaggaguucgaggac

SEQ ID NO: 7124 - RNA, 20 nt, Artificial Sequence
  Synthetic
ggagcaugcaggaguucgag

SEQ ID NO: 7125 - RNA, 20 nt, Artificial Sequence
  Synthetic
ggaguucgaggacaacgugc

SEQ ID NO: 7126 - RNA, 20 nt, Artificial Sequence
  Synthetic
guagagcacguuguccucga

SEQ ID NO: 7127 - RNA, 20 nt, Artificial Sequence
  Synthetic
guccucgaacuccugcaugc

SEQ ID NO: 7128 - RNA, 20 nt, Artificial Sequence
  Synthetic
guucgaggacaacgugcucu

SEQ ID NO: 7129 - RNA, 20 nt, Artificial Sequence
  Synthetic
guuguccucgaacuccugca

SEQ ID NO: 7130 - RNA, 20 nt, Artificial Sequence
  Synthetic
uagagcacguuguccucgaa

SEQ ID NO: 7131 - RNA, 20 nt, Artificial Sequence
  Synthetic
uccauguagagcacguuguc

SEQ ID NO: 7132 - RNA, 20 nt, Artificial Sequence
  Synthetic
uccggagcaugcaggaguuc

SEQ ID NO: 7133 - RNA, 20 nt, Artificial Sequence
  Synthetic
uccucgaacuccugcaugcu

SEQ ID NO: 7134 - RNA, 20 nt, Artificial Sequence
  Synthetic
ucgaacuccugcaugcuccg

SEQ ID NO: 7135 - RNA, 20 nt, Artificial Sequence
  Synthetic
ucgaggacaacgugcucuac

SEQ ID NO: 7136 - RNA, 20 nt, Artificial Sequence
  Synthetic
ucuuccggagcaugcaggag

SEQ ID NO: 7137 - RNA, 20 nt, Artificial Sequence
  Synthetic
ugcaggaguucgaggacaac

SEQ ID NO: 7138 - RNA, 20 nt, Artificial Sequence
  Synthetic
uguagagcacguuguccucg

SEQ ID NO: 7139 - RNA, 20 nt, Artificial Sequence
  Synthetic
uguccucgaacuccugcaug

SEQ ID NO: 7140 - RNA, 20 nt, Artificial Sequence
  Synthetic
uuccggagcaugcaggaguu

SEQ ID NO: 7141 - RNA, 20 nt, Artificial Sequence
  Synthetic
uucgaggacaacgugcucua

SEQ ID NO: 7142 - RNA, 20 nt, Artificial Sequence
  Synthetic
uuguccucgaacuccugcau

SEQ ID NO: 7143 - RNA, 21 nt, Artificial Sequence
  Synthetic
acguuguccucgaacuccugc

SEQ ID NO: 7144 - RNA, 21 nt, Artificial Sequence
  Synthetic
agagcacguuguccucgaacu

SEQ ID NO: 7145 - RNA, 21 nt, Artificial Sequence
  Synthetic
agcacguuguccucgaacucc

SEQ ID NO: 7146 - RNA, 21 nt, Artificial Sequence
  Synthetic
agcaugcaggaguucgaggac

SEQ ID NO: 7147 - RNA, 21 nt, Artificial Sequence
  Synthetic
aggaguucgaggacaacgugc

SEQ ID NO: 7148 - RNA, 21 nt, Artificial Sequence
  Synthetic
aguucgaggacaacgugcucu

SEQ ID NO: 7149 - RNA, 21 nt, Artificial Sequence
  Synthetic
augcaggaguucgaggacaac

SEQ ID NO: 7150 - RNA, 21 nt, Artificial Sequence
  Synthetic
auguagagcacguuguccucg

SEQ ID NO: 7151 - RNA, 21 nt, Artificial Sequence
  Synthetic
cacguuguccucgaacuccug

SEQ ID NO: 7152 - RNA, 21 nt, Artificial Sequence
  Synthetic
caggaguucgaggacaacgug

SEQ ID NO: 7153 - RNA, 21 nt, Artificial Sequence
  Synthetic
caugcaggaguucgaggacaa

SEQ ID NO: 7154 - RNA, 21 nt, Artificial Sequence
  Synthetic
cauguagagcacguuguccuc

SEQ ID NO: 7155 - RNA, 21 nt, Artificial Sequence
  Synthetic
ccauguagagcacguuguccu

SEQ ID NO: 7156 - RNA, 21 nt, Artificial Sequence
  Synthetic
ccggagcaugcaggaguucga

SEQ ID NO: 7157 - RNA, 21 nt, Artificial Sequence
  Synthetic
ccucgaacuccugcaugcucc

SEQ ID NO: 7158 - RNA, 21 nt, Artificial Sequence
  Synthetic
cggagcaugcaggaguucgag

SEQ ID NO: 7159 - RNA, 21 nt, Artificial Sequence
  Synthetic
cguuguccucgaacuccugca

SEQ ID NO: 7160 - RNA, 21 nt, Artificial Sequence
  Synthetic
cuccauguagagcacguuguc

SEQ ID NO: 7161 - RNA, 21 nt, Artificial Sequence
  Synthetic
cucgaacuccugcaugcuccg

SEQ ID NO: 7162 - RNA, 21 nt, Artificial Sequence
  Synthetic
cuuccggagcaugcaggaguu

SEQ ID NO: 7163 - RNA, 21 nt, Artificial Sequence
  Synthetic
gagcacguuguccucgaacuc

SEQ ID NO: 7164 - RNA, 21 nt, Artificial Sequence
  Synthetic
gagcaugcaggaguucgagga

SEQ ID NO: 7165 - RNA, 21 nt, Artificial Sequence
  Synthetic
gaguucgaggacaacgugcuc

SEQ ID NO: 7166 - RNA, 21 nt, Artificial Sequence
  Synthetic
gcacguuguccucgaacuccu

SEQ ID NO: 7167 - RNA, 21 nt, Artificial Sequence
  Synthetic
gcaggaguucgaggacaacgu

SEQ ID NO: 7168 - RNA, 21 nt, Artificial Sequence
  Synthetic
gcaugcaggaguucgaggaca

SEQ ID NO: 7169 - RNA, 21 nt, Artificial Sequence
  Synthetic
ggagcaugcaggaguucgagg

SEQ ID NO: 7170 - RNA, 21 nt, Artificial Sequence
  Synthetic
ggaguucgaggacaacgugcu

SEQ ID NO: 7171 - RNA, 21 nt, Artificial Sequence
  Synthetic
guagagcacguuguccucgaa

SEQ ID NO: 7172 - RNA, 21 nt, Artificial Sequence
  Synthetic
guccucgaacuccugcaugcu

SEQ ID NO: 7173 - RNA, 21 nt, Artificial Sequence
  Synthetic
gucuuccggagcaugcaggag

SEQ ID NO: 7174 - RNA, 21 nt, Artificial Sequence
  Synthetic
guucgaggacaacgugcucua

SEQ ID NO: 7175 - RNA, 21 nt, Artificial Sequence
  Synthetic
guuguccucgaacuccugcau

SEQ ID NO: 7176 - RNA, 21 nt, Artificial Sequence
  Synthetic
uagagcacguuguccucgaac

SEQ ID NO: 7177 - RNA, 21 nt, Artificial Sequence
  Synthetic
uccauguagagcacguugucc

SEQ ID NO: 7178 - RNA, 21 nt, Artificial Sequence
  Synthetic
uccggagcaugcaggaguucg

SEQ ID NO: 7179 - RNA, 21 nt, Artificial Sequence
  Synthetic
uccucgaacuccugcaugcuc

SEQ ID NO: 7180 - RNA, 21 nt, Artificial Sequence
  Synthetic
ucgaacuccugcaugcuccgg

SEQ ID NO: 7181 - RNA, 21 nt, Artificial Sequence
  Synthetic
ucgaggacaacgugcucuaca

SEQ ID NO: 7182 - RNA, 21 nt, Artificial Sequence
  Synthetic
ucuuccggagcaugcaggagu

SEQ ID NO: 7183 - RNA, 21 nt, Artificial Sequence
  Synthetic
ugcaggaguucgaggacaacg

SEQ ID NO: 7184 - RNA, 21 nt, Artificial Sequence
  Synthetic
uguagagcacguuguccucga

SEQ ID NO: 7185 - RNA, 21 nt, Artificial Sequence
  Synthetic
uguccucgaacuccugcaugc

SEQ ID NO: 7186 - RNA, 21 nt, Artificial Sequence
  Synthetic
uuccggagcaugcaggaguuc

SEQ ID NO: 7187 - RNA, 21 nt, Artificial Sequence
  Synthetic
uucgaggacaacgugcucuac

SEQ ID NO: 7188 - RNA, 21 nt, Artificial Sequence
  Synthetic
uuguccucgaacuccugcaug

SEQ ID NO: 7189 - RNA, 22 nt, Artificial Sequence
  Synthetic
acguuguccucgaacuccugca

SEQ ID NO: 7190 - RNA, 22 nt, Artificial Sequence
  Synthetic
agagcacguuguccucgaacuc

SEQ ID NO: 7191 - RNA, 22 nt, Artificial Sequence
  Synthetic
agcacguuguccucgaacuccu

SEQ ID NO: 7192 - RNA, 22 nt, Artificial Sequence
  Synthetic
agcaugcaggaguucgaggaca

SEQ ID NO: 7193 - RNA, 22 nt, Artificial Sequence
  Synthetic
aggaguucgaggacaacgugcu

SEQ ID NO: 7194 - RNA, 22 nt, Artificial Sequence
  Synthetic
aguucgaggacaacgugcucua

SEQ ID NO: 7195 - RNA, 22 nt, Artificial Sequence
  Synthetic
augcaggaguucgaggacaacg

SEQ ID NO: 7196 - RNA, 22 nt, Artificial Sequence
  Synthetic
auguagagcacguuguccucga

SEQ ID NO: 7197 - RNA, 22 nt, Artificial Sequence
  Synthetic
cacguuguccucgaacuccugc

SEQ ID NO: 7198 - RNA, 22 nt, Artificial Sequence
  Synthetic
caggaguucgaggacaacgugc

SEQ ID NO: 7199 - RNA, 22 nt, Artificial Sequence
  Synthetic
caugcaggaguucgaggacaac

SEQ ID NO: 7200 - RNA, 22 nt, Artificial Sequence
  Synthetic
cauguagagcacguuguccucg

SEQ ID NO: 7201 - RNA, 22 nt, Artificial Sequence
  Synthetic
ccauguagagcacguuguccuc

SEQ ID NO: 7202 - RNA, 22 nt, Artificial Sequence
  Synthetic
ccggagcaugcaggaguucgag

SEQ ID NO: 7203 - RNA, 22 nt, Artificial Sequence
  Synthetic
ccucgaacuccugcaugcuccg

SEQ ID NO: 7204 - RNA, 22 nt, Artificial Sequence
  Synthetic
cgaggacaacgugcucuacaug

SEQ ID NO: 7205 - RNA, 22 nt, Artificial Sequence
  Synthetic
cggagcaugcaggaguucgagg

SEQ ID NO: 7206 - RNA, 22 nt, Artificial Sequence
  Synthetic
cguuguccucgaacuccugcau

SEQ ID NO: 7207 - RNA, 22 nt, Artificial Sequence
  Synthetic
cuccauguagagcacguugucc

SEQ ID NO: 7208 - RNA, 22 nt, Artificial Sequence
  Synthetic
cucgaacuccugcaugcuccgg

SEQ ID NO: 7209 - RNA, 22 nt, Artificial Sequence
  Synthetic
cuuccggagcaugcaggaguuc

SEQ ID NO: 7210 - RNA, 22 nt, Artificial Sequence
  Synthetic
gagcacguuguccucgaacucc

SEQ ID NO: 7211 - RNA, 22 nt, Artificial Sequence
  Synthetic
gagcaugcaggaguucgaggac

SEQ ID NO: 7212 - RNA, 22 nt, Artificial Sequence
  Synthetic
gaguucgaggacaacgugcucu

SEQ ID NO: 7213 - RNA, 22 nt, Artificial Sequence
  Synthetic
gcacguuguccucgaacuccug

SEQ ID NO: 7214 - RNA, 22 nt, Artificial Sequence
  Synthetic
gcaggaguucgaggacaacgug

SEQ ID NO: 7215 - RNA, 22 nt, Artificial Sequence
  Synthetic
gcaugcaggaguucgaggacaa

SEQ ID NO: 7216 - RNA, 22 nt, Artificial Sequence
  Synthetic
ggagcaugcaggaguucgagga

SEQ ID NO: 7217 - RNA, 22 nt, Artificial Sequence
  Synthetic
ggaguucgaggacaacgugcuc

SEQ ID NO: 7218 - RNA, 22 nt, Artificial Sequence
  Synthetic
guagagcacguuguccucgaac

SEQ ID NO: 7219 - RNA, 22 nt, Artificial Sequence
  Synthetic
guccucgaacuccugcaugcuc

SEQ ID NO: 7220 - RNA, 22 nt, Artificial Sequence
  Synthetic
gucuuccggagcaugcaggagu

SEQ ID NO: 7221 - RNA, 22 nt, Artificial Sequence
  Synthetic
guucgaggacaacgugcucuac

SEQ ID NO: 7222 - RNA, 22 nt, Artificial Sequence
  Synthetic
guuguccucgaacuccugcaug

SEQ ID NO: 7223 - RNA, 22 nt, Artificial Sequence
  Synthetic
uagagcacguuguccucgaacu

SEQ ID NO: 7224 - RNA, 22 nt, Artificial Sequence
  Synthetic
uccauguagagcacguuguccu

SEQ ID NO: 7225 - RNA, 22 nt, Artificial Sequence
  Synthetic
uccggagcaugcaggaguucga

SEQ ID NO: 7226 - RNA, 22 nt, Artificial Sequence
  Synthetic
uccucgaacuccugcaugcucc

SEQ ID NO: 7227 - RNA, 22 nt, Artificial Sequence
  Synthetic
ucgaacuccugcaugcuccgga

SEQ ID NO: 7228 - RNA, 22 nt, Artificial Sequence
  Synthetic
ucgaggacaacgugcucuacau

SEQ ID NO: 7229 - RNA, 22 nt, Artificial Sequence
  Synthetic
ucuccauguagagcacguuguc

SEQ ID NO: 7230 - RNA, 22 nt, Artificial Sequence
  Synthetic
ucuuccggagcaugcaggaguu

SEQ ID NO: 7231 - RNA, 22 nt, Artificial Sequence
  Synthetic
ugcaggaguucgaggacaacgu

SEQ ID NO: 7232 - RNA, 22 nt, Artificial Sequence
  Synthetic
uguagagcacguuguccucgaa

SEQ ID NO: 7233 - RNA, 22 nt, Artificial Sequence
  Synthetic
uguccucgaacuccugcaugcu

SEQ ID NO: 7234 - RNA, 22 nt, Artificial Sequence
  Synthetic
ugucuuccggagcaugcaggag

SEQ ID NO: 7235 - RNA, 22 nt, Artificial Sequence
  Synthetic
uuccggagcaugcaggaguucg

SEQ ID NO: 7236 - RNA, 22 nt, Artificial Sequence
  Synthetic
uucgaggacaacgugcucuaca

SEQ ID NO: 7237 - RNA, 22 nt, Artificial Sequence
  Synthetic
uuguccucgaacuccugcaugc

SEQ ID NO: 7238 - RNA, 20 nt, Artificial Sequence
  Synthetic
aacuccugcaugcuccagaa

SEQ ID NO: 7239 - RNA, 20 nt, Artificial Sequence
  Synthetic
acuaugucuucuggagcaug

SEQ ID NO: 7240 - RNA, 20 nt, Artificial Sequence
  Synthetic
acuccugcaugcuccagaag

SEQ ID NO: 7241 - RNA, 20 nt, Artificial Sequence
  Synthetic
agaacuccugcaugcuccag

SEQ ID NO: 7242 - RNA, 20 nt, Artificial Sequence
  Synthetic
agacuaugucuucuggagca

SEQ ID NO: 7243 - RNA, 20 nt, Artificial Sequence
  Synthetic
agagacuaugucuucuggag

SEQ ID NO: 7244 - RNA, 20 nt, Artificial Sequence
  Synthetic
aguguucagagacuaugucu

SEQ ID NO: 7245 - RNA, 20 nt, Artificial Sequence
  Synthetic
augcuccagaagacauaguc

SEQ ID NO: 7246 - RNA, 20 nt, Artificial Sequence
  Synthetic
augucuucuggagcaugcag

SEQ ID NO: 7247 - RNA, 20 nt, Artificial Sequence
  Synthetic
cagaagacauagucucugaa

SEQ ID NO: 7248 - RNA, 20 nt, Artificial Sequence
  Synthetic
cagagacuaugucuucugga

SEQ ID NO: 7249 - RNA, 20 nt, Artificial Sequence
  Synthetic
caguguucagagacuauguc

SEQ ID NO: 7250 - RNA, 20 nt, Artificial Sequence
  Synthetic
caugcuccagaagacauagu

SEQ ID NO: 7251 - RNA, 20 nt, Artificial Sequence
  Synthetic
ccagaagacauagucucuga

SEQ ID NO: 7252 - RNA, 20 nt, Artificial Sequence
  Synthetic
ccugcaugcuccagaagaca

SEQ ID NO: 7253 - RNA, 20 nt, Artificial Sequence
  Synthetic
cguagaacuccugcaugcuc

SEQ ID NO: 7254 - RNA, 20 nt, Artificial Sequence
  Synthetic
cuaugucuucuggagcaugc

SEQ ID NO: 7255 - RNA, 20 nt, Artificial Sequence
  Synthetic
cuccagaagacauagucucu

SEQ ID NO: 7256 - RNA, 20 nt, Artificial Sequence
  Synthetic
cuccugcaugcuccagaaga

SEQ ID NO: 7257 - RNA, 20 nt, Artificial Sequence
  Synthetic
cucguagaacuccugcaugc

SEQ ID NO: 7258 - RNA, 20 nt, Artificial Sequence
  Synthetic
cugcaugcuccagaagacau

SEQ ID NO: 7259 - RNA, 20 nt, Artificial Sequence
  Synthetic
cuggagcaugcaggaguucu

SEQ ID NO: 7260 - RNA, 20 nt, Artificial Sequence
  Synthetic
cuucuggagcaugcaggagu

SEQ ID NO: 7261 - RNA, 20 nt, Artificial Sequence
  Synthetic
gaacuccugcaugcuccaga

SEQ ID NO: 7262 - RNA, 20 nt, Artificial Sequence
  Synthetic
gacuaugucuucuggagcau

SEQ ID NO: 7263 - RNA, 20 nt, Artificial Sequence
  Synthetic
gagacuaugucuucuggagc

SEQ ID NO: 7264 - RNA, 20 nt, Artificial Sequence
  Synthetic
gcaugcuccagaagacauag

SEQ ID NO: 7265 - RNA, 20 nt, Artificial Sequence
  Synthetic
gcuccagaagacauagucuc

SEQ ID NO: 7266 - RNA, 20 nt, Artificial Sequence
  Synthetic
guagaacuccugcaugcucc

SEQ ID NO: 7267 - RNA, 20 nt, Artificial Sequence
  Synthetic
gucuucuggagcaugcagga

SEQ ID NO: 7268 - RNA, 20 nt, Artificial Sequence
  Synthetic
guguucagagacuaugucuu

SEQ ID NO: 7269 - RNA, 20 nt, Artificial Sequence
  Synthetic
guucagagacuaugucuucu

SEQ ID NO: 7270 - RNA, 20 nt, Artificial Sequence
  Synthetic
uagaacuccugcaugcucca

SEQ ID NO: 7271 - RNA, 20 nt, Artificial Sequence
  Synthetic
uaugucuucuggagcaugca

SEQ ID NO: 7272 - RNA, 20 nt, Artificial Sequence
  Synthetic
ucagagacuaugucuucugg

SEQ ID NO: 7273 - RNA, 20 nt, Artificial Sequence
  Synthetic
uccagaagacauagucucug

SEQ ID NO: 7274 - RNA, 20 nt, Artificial Sequence
  Synthetic
uccugcaugcuccagaagac

SEQ ID NO: 7275 - RNA, 20 nt, Artificial Sequence
  Synthetic
ucguagaacuccugcaugcu

SEQ ID NO: 7276 - RNA, 20 nt, Artificial Sequence
  Synthetic
ucuggagcaugcaggaguuc

SEQ ID NO: 7277 - RNA, 20 nt, Artificial Sequence
  Synthetic
ucuucuggagcaugcaggag

SEQ ID NO: 7278 - RNA, 20 nt, Artificial Sequence
  Synthetic
ugcaugcuccagaagacaua

SEQ ID NO: 7279 - RNA, 20 nt, Artificial Sequence
  Synthetic
ugcuccagaagacauagucu

SEQ ID NO: 7280 - RNA, 20 nt, Artificial Sequence
  Synthetic
ugucuucuggagcaugcagg

SEQ ID NO: 7281 - RNA, 20 nt, Artificial Sequence
  Synthetic
uguucagagacuaugucuuc

SEQ ID NO: 7282 - RNA, 20 nt, Artificial Sequence
  Synthetic
uucagagacuaugucuucug

SEQ ID NO: 7283 - RNA, 20 nt, Artificial Sequence
  Synthetic
uucuggagcaugcaggaguu

SEQ ID NO: 7284 - RNA, 21 nt, Artificial Sequence
  Synthetic
aacuccugcaugcuccagaag

SEQ ID NO: 7285 - RNA, 21 nt, Artificial Sequence
  Synthetic
acuaugucuucuggagcaugc

SEQ ID NO: 7286 - RNA, 21 nt, Artificial Sequence
  Synthetic
acuccugcaugcuccagaaga

SEQ ID NO: 7287 - RNA, 21 nt, Artificial Sequence
  Synthetic
agaacuccugcaugcuccaga

SEQ ID NO: 7288 - RNA, 21 nt, Artificial Sequence
  Synthetic
agacuaugucuucuggagcau

SEQ ID NO: 7289 - RNA, 21 nt, Artificial Sequence
  Synthetic
agagacuaugucuucuggagc

SEQ ID NO: 7290 - RNA, 21 nt, Artificial Sequence
  Synthetic
aguguucagagacuaugucuu

SEQ ID NO: 7291 - RNA, 21 nt, Artificial Sequence
  Synthetic
augcuccagaagacauagucu

SEQ ID NO: 7292 - RNA, 21 nt, Artificial Sequence
  Synthetic
augucuucuggagcaugcagg

SEQ ID NO: 7293 - RNA, 21 nt, Artificial Sequence
  Synthetic
cagaagacauagucucugaac

SEQ ID NO: 7294 - RNA, 21 nt, Artificial Sequence
  Synthetic
cagagacuaugucuucuggag

SEQ ID NO: 7295 - RNA, 21 nt, Artificial Sequence
  Synthetic
caguguucagagacuaugucu

SEQ ID NO: 7296 - RNA, 21 nt, Artificial Sequence
  Synthetic
caugcuccagaagacauaguc

SEQ ID NO: 7297 - RNA, 21 nt, Artificial Sequence
  Synthetic
ccagaagacauagucucugaa

SEQ ID NO: 7298 - RNA, 21 nt, Artificial Sequence
  Synthetic
ccaguguucagagacuauguc

SEQ ID NO: 7299 - RNA, 21 nt, Artificial Sequence
  Synthetic
ccucguagaacuccugcaugc

SEQ ID NO: 7300 - RNA, 21 nt, Artificial Sequence
  Synthetic
ccugcaugcuccagaagacau

SEQ ID NO: 7301 - RNA, 21 nt, Artificial Sequence
  Synthetic
cguagaacuccugcaugcucc

SEQ ID NO: 7302 - RNA, 21 nt, Artificial Sequence
  Synthetic
cuaugucuucuggagcaugca

SEQ ID NO: 7303 - RNA, 21 nt, Artificial Sequence
  Synthetic
cuccagaagacauagucucug

SEQ ID NO: 7304 - RNA, 21 nt, Artificial Sequence
  Synthetic
cuccugcaugcuccagaagac

SEQ ID NO: 7305 - RNA, 21 nt, Artificial Sequence
  Synthetic
cucguagaacuccugcaugcu

SEQ ID NO: 7306 - RNA, 21 nt, Artificial Sequence
  Synthetic
cugcaugcuccagaagacaua

SEQ ID NO: 7307 - RNA, 21 nt, Artificial Sequence
  Synthetic
cuggagcaugcaggaguucua

SEQ ID NO: 7308 - RNA, 21 nt, Artificial Sequence
  Synthetic
cuucuggagcaugcaggaguu

SEQ ID NO: 7309 - RNA, 21 nt, Artificial Sequence
  Synthetic
gaacuccugcaugcuccagaa

SEQ ID NO: 7310 - RNA, 21 nt, Artificial Sequence
  Synthetic
gacuaugucuucuggagcaug

SEQ ID NO: 7311 - RNA, 21 nt, Artificial Sequence
  Synthetic
gagacuaugucuucuggagca

SEQ ID NO: 7312 - RNA, 21 nt, Artificial Sequence
  Synthetic
gcaugcuccagaagacauagu

SEQ ID NO: 7313 - RNA, 21 nt, Artificial Sequence
  Synthetic
gcuccagaagacauagucucu

SEQ ID NO: 7314 - RNA, 21 nt, Artificial Sequence
  Synthetic
guagaacuccugcaugcucca

SEQ ID NO: 7315 - RNA, 21 nt, Artificial Sequence
  Synthetic
gucuucuggagcaugcaggag

SEQ ID NO: 7316 - RNA, 21 nt, Artificial Sequence
  Synthetic
guguucagagacuaugucuuc

SEQ ID NO: 7317 - RNA, 21 nt, Artificial Sequence
  Synthetic
guucagagacuaugucuucug

SEQ ID NO: 7318 - RNA, 21 nt, Artificial Sequence
  Synthetic
uagaacuccugcaugcuccag

SEQ ID NO: 7319 - RNA, 21 nt, Artificial Sequence
  Synthetic
uaugucuucuggagcaugcag

SEQ ID NO: 7320 - RNA, 21 nt, Artificial Sequence
  Synthetic
ucagagacuaugucuucugga

SEQ ID NO: 7321 - RNA, 21 nt, Artificial Sequence
  Synthetic
uccagaagacauagucucuga

SEQ ID NO: 7322 - RNA, 21 nt, Artificial Sequence
  Synthetic
uccugcaugcuccagaagaca

SEQ ID NO: 7323 - RNA, 21 nt, Artificial Sequence
  Synthetic
ucguagaacuccugcaugcuc

SEQ ID NO: 7324 - RNA, 21 nt, Artificial Sequence
  Synthetic
ucuggagcaugcaggaguucu

SEQ ID NO: 7325 - RNA, 21 nt, Artificial Sequence
  Synthetic
ucuucuggagcaugcaggagu

SEQ ID NO: 7326 - RNA, 21 nt, Artificial Sequence
  Synthetic
ugcaugcuccagaagacauag

SEQ ID NO: 7327 - RNA, 21 nt, Artificial Sequence
  Synthetic
ugcuccagaagacauagucuc

SEQ ID NO: 7328 - RNA, 21 nt, Artificial Sequence
  Synthetic
ugucuucuggagcaugcagga

SEQ ID NO: 7329 - RNA, 21 nt, Artificial Sequence
  Synthetic
uguucagagacuaugucuucu

SEQ ID NO: 7330 - RNA, 21 nt, Artificial Sequence
  Synthetic
uucagagacuaugucuucugg

SEQ ID NO: 7331 - RNA, 21 nt, Artificial Sequence
  Synthetic
uucuggagcaugcaggaguuc

SEQ ID NO: 7332 - RNA, 22 nt, Artificial Sequence
  Synthetic
aacuccugcaugcuccagaaga

SEQ ID NO: 7333 - RNA, 22 nt, Artificial Sequence
  Synthetic
accaguguucagagacuauguc

SEQ ID NO: 7334 - RNA, 22 nt, Artificial Sequence
  Synthetic
acuaugucuucuggagcaugca

SEQ ID NO: 7335 - RNA, 22 nt, Artificial Sequence
  Synthetic
acuccugcaugcuccagaagac

SEQ ID NO: 7336 - RNA, 22 nt, Artificial Sequence
  Synthetic
agaacuccugcaugcuccagaa

SEQ ID NO: 7337 - RNA, 22 nt, Artificial Sequence
  Synthetic
agacuaugucuucuggagcaug

SEQ ID NO: 7338 - RNA, 22 nt, Artificial Sequence
  Synthetic
agagacuaugucuucuggagca

SEQ ID NO: 7339 - RNA, 22 nt, Artificial Sequence
  Synthetic
aguguucagagacuaugucuuc

SEQ ID NO: 7340 - RNA, 22 nt, Artificial Sequence
  Synthetic
augcuccagaagacauagucuc

SEQ ID NO: 7341 - RNA, 22 nt, Artificial Sequence
  Synthetic
augucuucuggagcaugcagga

SEQ ID NO: 7342 - RNA, 22 nt, Artificial Sequence
  Synthetic
cagaagacauagucucugaaca

SEQ ID NO: 7343 - RNA, 22 nt, Artificial Sequence
  Synthetic
cagagacuaugucuucuggagc

SEQ ID NO: 7344 - RNA, 22 nt, Artificial Sequence
  Synthetic
caguguucagagacuaugucuu

SEQ ID NO: 7345 - RNA, 22 nt, Artificial Sequence
  Synthetic
caugcuccagaagacauagucu

SEQ ID NO: 7346 - RNA, 22 nt, Artificial Sequence
  Synthetic
ccagaagacauagucucugaac

SEQ ID NO: 7347 - RNA, 22 nt, Artificial Sequence
  Synthetic
ccaguguucagagacuaugucu

SEQ ID NO: 7348 - RNA, 22 nt, Artificial Sequence
  Synthetic
ccucguagaacuccugcaugcu

SEQ ID NO: 7349 - RNA, 22 nt, Artificial Sequence
  Synthetic
ccugcaugcuccagaagacaua

SEQ ID NO: 7350 - RNA, 22 nt, Artificial Sequence
  Synthetic
cguagaacuccugcaugcucca

SEQ ID NO: 7351 - RNA, 22 nt, Artificial Sequence
  Synthetic
cuaugucuucuggagcaugcag

SEQ ID NO: 7352 - RNA, 22 nt, Artificial Sequence
  Synthetic
cuccagaagacauagucucuga

SEQ ID NO: 7353 - RNA, 22 nt, Artificial Sequence
  Synthetic
cuccugcaugcuccagaagaca

SEQ ID NO: 7354 - RNA, 22 nt, Artificial Sequence
  Synthetic
cucguagaacuccugcaugcuc

SEQ ID NO: 7355 - RNA, 22 nt, Artificial Sequence
  Synthetic
cugcaugcuccagaagacauag

SEQ ID NO: 7356 - RNA, 22 nt, Artificial Sequence
  Synthetic
cuggagcaugcaggaguucuac

SEQ ID NO: 7357 - RNA, 22 nt, Artificial Sequence
  Synthetic
cuucuggagcaugcaggaguuc

SEQ ID NO: 7358 - RNA, 22 nt, Artificial Sequence
  Synthetic
gaacuccugcaugcuccagaag

SEQ ID NO: 7359 - RNA, 22 nt, Artificial Sequence
  Synthetic
gacuaugucuucuggagcaugc

SEQ ID NO: 7360 - RNA, 22 nt, Artificial Sequence
  Synthetic
gagacuaugucuucuggagcau

SEQ ID NO: 7361 - RNA, 22 nt, Artificial Sequence
  Synthetic
gcaugcuccagaagacauaguc

SEQ ID NO: 7362 - RNA, 22 nt, Artificial Sequence
  Synthetic
gcuccagaagacauagucucug

SEQ ID NO: 7363 - RNA, 22 nt, Artificial Sequence
  Synthetic
guagaacuccugcaugcuccag

SEQ ID NO: 7364 - RNA, 22 nt, Artificial Sequence
  Synthetic
gucuucuggagcaugcaggagu

SEQ ID NO: 7365 - RNA, 22 nt, Artificial Sequence
  Synthetic
guguucagagacuaugucuucu

SEQ ID NO: 7366 - RNA, 22 nt, Artificial Sequence
  Synthetic
guucagagacuaugucuucugg

SEQ ID NO: 7367 - RNA, 22 nt, Artificial Sequence
  Synthetic
uagaacuccugcaugcuccaga

SEQ ID NO: 7368 - RNA, 22 nt, Artificial Sequence
  Synthetic
uaugucuucuggagcaugcagg

SEQ ID NO: 7369 - RNA, 22 nt, Artificial Sequence
  Synthetic
ucagagacuaugucuucuggag

SEQ ID NO: 7370 - RNA, 22 nt, Artificial Sequence
  Synthetic
uccagaagacauagucucugaa

SEQ ID NO: 7371 - RNA, 22 nt, Artificial Sequence
  Synthetic
uccucguagaacuccugcaugc

SEQ ID NO: 7372 - RNA, 22 nt, Artificial Sequence
  Synthetic
uccugcaugcuccagaagacau

SEQ ID NO: 7373 - RNA, 22 nt, Artificial Sequence
  Synthetic
ucguagaacuccugcaugcucc

SEQ ID NO: 7374 - RNA, 22 nt, Artificial Sequence
  Synthetic
ucuggagcaugcaggaguucua

SEQ ID NO: 7375 - RNA, 22 nt, Artificial Sequence
  Synthetic
ucuucuggagcaugcaggaguu

SEQ ID NO: 7376 - RNA, 22 nt, Artificial Sequence
  Synthetic
ugcaugcuccagaagacauagu

SEQ ID NO: 7377 - RNA, 22 nt, Artificial Sequence
  Synthetic
ugcuccagaagacauagucucu

SEQ ID NO: 7378 - RNA, 22 nt, Artificial Sequence
  Synthetic
ugucuucuggagcaugcaggag

SEQ ID NO: 7379 - RNA, 22 nt, Artificial Sequence
  Synthetic
uguucagagacuaugucuucug

SEQ ID NO: 7380 - RNA, 22 nt, Artificial Sequence
  Synthetic
uucagagacuaugucuucugga

SEQ ID NO: 7381 - RNA, 22 nt, Artificial Sequence
  Synthetic
uucuggagcaugcaggaguucu

SEQ ID NO: 7382 - RNA, 20 nt, Artificial Sequence
  Synthetic
aacacugguaauggaugaga

SEQ ID NO: 7383 - RNA, 20 nt, Artificial Sequence
  Synthetic
aagacauagucucugaacac

SEQ ID NO: 7384 - RNA, 20 nt, Artificial Sequence
  Synthetic
acacugguaauggaugagac

SEQ ID NO: 7385 - RNA, 20 nt, Artificial Sequence
  Synthetic
acauagucucugaacacugg

SEQ ID NO: 7386 - RNA, 20 nt, Artificial Sequence
  Synthetic
accaguguucagagacuaug

SEQ ID NO: 7387 - RNA, 20 nt, Artificial Sequence
  Synthetic
acugguaauggaugagacca

SEQ ID NO: 7388 - RNA, 20 nt, Artificial Sequence
  Synthetic
agacauagucucugaacacu

SEQ ID NO: 7389 - RNA, 20 nt, Artificial Sequence
  Synthetic
agucucugaacacugguaau

SEQ ID NO: 7390 - RNA, 20 nt, Artificial Sequence
  Synthetic
auagucucugaacacuggua

SEQ ID NO: 7391 - RNA, 20 nt, Artificial Sequence
  Synthetic
auccauuaccaguguucaga

SEQ ID NO: 7392 - RNA, 20 nt, Artificial Sequence
  Synthetic
aucucuggucucauccauua

SEQ ID NO: 7393 - RNA, 20 nt, Artificial Sequence
  Synthetic
auuaccaguguucagagacu

SEQ ID NO: 7394 - RNA, 20 nt, Artificial Sequence
  Synthetic
cacugguaauggaugagacc

SEQ ID NO: 7395 - RNA, 20 nt, Artificial Sequence
  Synthetic
cauagucucugaacacuggu

SEQ ID NO: 7396 - RNA, 20 nt, Artificial Sequence
  Synthetic
cauccauuaccaguguucag

SEQ ID NO: 7397 - RNA, 20 nt, Artificial Sequence
  Synthetic
caucucuggucucauccauu

SEQ ID NO: 7398 - RNA, 20 nt, Artificial Sequence
  Synthetic
cauuaccaguguucagagac

SEQ ID NO: 7399 - RNA, 20 nt, Artificial Sequence
  Synthetic
ccaguguucagagacuaugu

SEQ ID NO: 7400 - RNA, 20 nt, Artificial Sequence
  Synthetic
ccaucucuggucucauccau

SEQ ID NO: 7401 - RNA, 20 nt, Artificial Sequence
  Synthetic
ccauuaccaguguucagaga

SEQ ID NO: 7402 - RNA, 20 nt, Artificial Sequence
  Synthetic
cucauccauuaccaguguuc

SEQ ID NO: 7403 - RNA, 20 nt, Artificial Sequence
  Synthetic
cucugaacacugguaaugga

SEQ ID NO: 7404 - RNA, 20 nt, Artificial Sequence
  Synthetic
cucuggucucauccauuacc

SEQ ID NO: 7405 - RNA, 20 nt, Artificial Sequence
  Synthetic
cugaacacugguaauggaug

SEQ ID NO: 7406 - RNA, 20 nt, Artificial Sequence
  Synthetic
cugguaauggaugagaccag

SEQ ID NO: 7407 - RNA, 20 nt, Artificial Sequence
  Synthetic
cuggucucauccauuaccag

SEQ ID NO: 7408 - RNA, 20 nt, Artificial Sequence
  Synthetic
gaacacugguaauggaugag

SEQ ID NO: 7409 - RNA, 20 nt, Artificial Sequence
  Synthetic
gaagacauagucucugaaca

SEQ ID NO: 7410 - RNA, 20 nt, Artificial Sequence
  Synthetic
gacauagucucugaacacug

SEQ ID NO: 7411 - RNA, 20 nt, Artificial Sequence
  Synthetic
ggaagacauagucucugaac

SEQ ID NO: 7412 - RNA, 20 nt, Artificial Sequence
  Synthetic
ggucucauccauuaccagug

SEQ ID NO: 7413 - RNA, 20 nt, Artificial Sequence
  Synthetic
gucucauccauuaccagugu

SEQ ID NO: 7414 - RNA, 20 nt, Artificial Sequence
  Synthetic
gucucugaacacugguaaug

SEQ ID NO: 7415 - RNA, 20 nt, Artificial Sequence
  Synthetic
uaccaguguucagagacuau

SEQ ID NO: 7416 - RNA, 20 nt, Artificial Sequence
  Synthetic
uagucucugaacacugguaa

SEQ ID NO: 7417 - RNA, 20 nt, Artificial Sequence
  Synthetic
ucauccauuaccaguguuca

SEQ ID NO: 7418 - RNA, 20 nt, Artificial Sequence
  Synthetic
uccauuaccaguguucagag

SEQ ID NO: 7419 - RNA, 20 nt, Artificial Sequence
  Synthetic
ucucauccauuaccaguguu

SEQ ID NO: 7420 - RNA, 20 nt, Artificial Sequence
  Synthetic
ucucugaacacugguaaugg

SEQ ID NO: 7421 - RNA, 20 nt, Artificial Sequence
  Synthetic
ucucuggucucauccauuac

SEQ ID NO: 7422 - RNA, 20 nt, Artificial Sequence
  Synthetic
ucugaacacugguaauggau

SEQ ID NO: 7423 - RNA, 20 nt, Artificial Sequence
  Synthetic
ucuggucucauccauuacca

SEQ ID NO: 7424 - RNA, 20 nt, Artificial Sequence
  Synthetic
ugaacacugguaauggauga

SEQ ID NO: 7425 - RNA, 20 nt, Artificial Sequence
  Synthetic
ugguaauggaugagaccaga

SEQ ID NO: 7426 - RNA, 20 nt, Artificial Sequence
  Synthetic
uggucucauccauuaccagu

SEQ ID NO: 7427 - RNA, 20 nt, Artificial Sequence
  Synthetic
uuaccaguguucagagacua

SEQ ID NO: 7428 - RNA, 21 nt, Artificial Sequence
  Synthetic
aacacugguaauggaugagac

SEQ ID NO: 7429 - RNA, 21 nt, Artificial Sequence
  Synthetic
aagacauagucucugaacacu

SEQ ID NO: 7430 - RNA, 21 nt, Artificial Sequence
  Synthetic
acacugguaauggaugagacc

SEQ ID NO: 7431 - RNA, 21 nt, Artificial Sequence
  Synthetic
acauagucucugaacacuggu

SEQ ID NO: 7432 - RNA, 21 nt, Artificial Sequence
  Synthetic
accaguguucagagacuaugu

SEQ ID NO: 7433 - RNA, 21 nt, Artificial Sequence
  Synthetic
accaucucuggucucauccau

SEQ ID NO: 7434 - RNA, 21 nt, Artificial Sequence
  Synthetic
acugguaauggaugagaccag

SEQ ID NO: 7435 - RNA, 21 nt, Artificial Sequence
  Synthetic
agacauagucucugaacacug

SEQ ID NO: 7436 - RNA, 21 nt, Artificial Sequence
  Synthetic
agucucugaacacugguaaug

SEQ ID NO: 7437 - RNA, 21 nt, Artificial Sequence
  Synthetic
auagucucugaacacugguaa

SEQ ID NO: 7438 - RNA, 21 nt, Artificial Sequence
  Synthetic
auccauuaccaguguucagag

SEQ ID NO: 7439 - RNA, 21 nt, Artificial Sequence
  Synthetic
aucucuggucucauccauuac

SEQ ID NO: 7440 - RNA, 21 nt, Artificial Sequence
  Synthetic
auuaccaguguucagagacua

SEQ ID NO: 7441 - RNA, 21 nt, Artificial Sequence
  Synthetic
cacugguaauggaugagacca

SEQ ID NO: 7442 - RNA, 21 nt, Artificial Sequence
  Synthetic
cauagucucugaacacuggua

SEQ ID NO: 7443 - RNA, 21 nt, Artificial Sequence
  Synthetic
cauccauuaccaguguucaga

SEQ ID NO: 7444 - RNA, 21 nt, Artificial Sequence
  Synthetic
caucucuggucucauccauua

SEQ ID NO: 7445 - RNA, 21 nt, Artificial Sequence
  Synthetic
cauuaccaguguucagagacu

SEQ ID NO: 7446 - RNA, 21 nt, Artificial Sequence
  Synthetic
ccaucucuggucucauccauu

SEQ ID NO: 7447 - RNA, 21 nt, Artificial Sequence
  Synthetic
ccauuaccaguguucagagac

SEQ ID NO: 7448 - RNA, 21 nt, Artificial Sequence
  Synthetic
cggaagacauagucucugaac

SEQ ID NO: 7449 - RNA, 21 nt, Artificial Sequence
  Synthetic
cucauccauuaccaguguuca

SEQ ID NO: 7450 - RNA, 21 nt, Artificial Sequence
  Synthetic
cucugaacacugguaauggau

SEQ ID NO: 7451 - RNA, 21 nt, Artificial Sequence
  Synthetic
cucuggucucauccauuacca

SEQ ID NO: 7452 - RNA, 21 nt, Artificial Sequence
  Synthetic
cugaacacugguaauggauga

SEQ ID NO: 7453 - RNA, 21 nt, Artificial Sequence
  Synthetic
cugguaauggaugagaccaga

SEQ ID NO: 7454 - RNA, 21 nt, Artificial Sequence
  Synthetic
cuggucucauccauuaccagu

SEQ ID NO: 7455 - RNA, 21 nt, Artificial Sequence
  Synthetic
gaacacugguaauggaugaga

SEQ ID NO: 7456 - RNA, 21 nt, Artificial Sequence
  Synthetic
gaagacauagucucugaacac

SEQ ID NO: 7457 - RNA, 21 nt, Artificial Sequence
  Synthetic
gacauagucucugaacacugg

SEQ ID NO: 7458 - RNA, 21 nt, Artificial Sequence
  Synthetic
ggaagacauagucucugaaca

SEQ ID NO: 7459 - RNA, 21 nt, Artificial Sequence
  Synthetic
ggucucauccauuaccagugu

SEQ ID NO: 7460 - RNA, 21 nt, Artificial Sequence
  Synthetic
gucucauccauuaccaguguu

SEQ ID NO: 7461 - RNA, 21 nt, Artificial Sequence
  Synthetic
gucucugaacacugguaaugg

SEQ ID NO: 7462 - RNA, 21 nt, Artificial Sequence
  Synthetic
uaccaguguucagagacuaug

SEQ ID NO: 7463 - RNA, 21 nt, Artificial Sequence
  Synthetic
uagucucugaacacugguaau

SEQ ID NO: 7464 - RNA, 21 nt, Artificial Sequence
  Synthetic
ucauccauuaccaguguucag

SEQ ID NO: 7465 - RNA, 21 nt, Artificial Sequence
  Synthetic
uccauuaccaguguucagaga

SEQ ID NO: 7466 - RNA, 21 nt, Artificial Sequence
  Synthetic
ucucauccauuaccaguguuc

SEQ ID NO: 7467 - RNA, 21 nt, Artificial Sequence
  Synthetic
ucucugaacacugguaaugga

SEQ ID NO: 7468 - RNA, 21 nt, Artificial Sequence
  Synthetic
ucucuggucucauccauuacc

SEQ ID NO: 7469 - RNA, 21 nt, Artificial Sequence
  Synthetic
ucugaacacugguaauggaug

SEQ ID NO: 7470 - RNA, 21 nt, Artificial Sequence
  Synthetic
ucuggucucauccauuaccag

SEQ ID NO: 7471 - RNA, 21 nt, Artificial Sequence
  Synthetic
ugaacacugguaauggaugag

SEQ ID NO: 7472 - RNA, 21 nt, Artificial Sequence
  Synthetic
ugguaauggaugagaccagag

SEQ ID NO: 7473 - RNA, 21 nt, Artificial Sequence
  Synthetic
uggucucauccauuaccagug

SEQ ID NO: 7474 - RNA, 21 nt, Artificial Sequence
  Synthetic
uuaccaguguucagagacuau

SEQ ID NO: 7475 - RNA, 22 nt, Artificial Sequence
  Synthetic
aacacugguaauggaugagacc

SEQ ID NO: 7476 - RNA, 22 nt, Artificial Sequence
  Synthetic
aagacauagucucugaacacug

SEQ ID NO: 7477 - RNA, 22 nt, Artificial Sequence
  Synthetic
acacugguaauggaugagacca

SEQ ID NO: 7478 - RNA, 22 nt, Artificial Sequence
  Synthetic
acauagucucugaacacuggua

SEQ ID NO: 7479 - RNA, 22 nt, Artificial Sequence
  Synthetic
accaucucuggucucauccauu

SEQ ID NO: 7480 - RNA, 22 nt, Artificial Sequence
  Synthetic
acugguaauggaugagaccaga

SEQ ID NO: 7481 - RNA, 22 nt, Artificial Sequence
  Synthetic
agacauagucucugaacacugg

SEQ ID NO: 7482 - RNA, 22 nt, Artificial Sequence
  Synthetic
agucucugaacacugguaaugg

SEQ ID NO: 7483 - RNA, 22 nt, Artificial Sequence
  Synthetic
auagucucugaacacugguaau

SEQ ID NO: 7484 - RNA, 22 nt, Artificial Sequence
  Synthetic
auccauuaccaguguucagaga

SEQ ID NO: 7485 - RNA, 22 nt, Artificial Sequence
  Synthetic
aucucuggucucauccauuacc

SEQ ID NO: 7486 - RNA, 22 nt, Artificial Sequence
  Synthetic
auuaccaguguucagagacuau

SEQ ID NO: 7487 - RNA, 22 nt, Artificial Sequence
  Synthetic
caccaucucuggucucauccau

SEQ ID NO: 7488 - RNA, 22 nt, Artificial Sequence
  Synthetic
cacugguaauggaugagaccag

SEQ ID NO: 7489 - RNA, 22 nt, Artificial Sequence
  Synthetic
cauagucucugaacacugguaa

SEQ ID NO: 7490 - RNA, 22 nt, Artificial Sequence
  Synthetic
cauccauuaccaguguucagag

SEQ ID NO: 7491 - RNA, 22 nt, Artificial Sequence
  Synthetic
caucucuggucucauccauuac

SEQ ID NO: 7492 - RNA, 22 nt, Artificial Sequence
  Synthetic
cauuaccaguguucagagacua

SEQ ID NO: 7493 - RNA, 22 nt, Artificial Sequence
  Synthetic
ccaucucuggucucauccauua

SEQ ID NO: 7494 - RNA, 22 nt, Artificial Sequence
  Synthetic
ccauuaccaguguucagagacu

SEQ ID NO: 7495 - RNA, 22 nt, Artificial Sequence
  Synthetic
ccggaagacauagucucugaac

SEQ ID NO: 7496 - RNA, 22 nt, Artificial Sequence
  Synthetic
cggaagacauagucucugaaca

SEQ ID NO: 7497 - RNA, 22 nt, Artificial Sequence
  Synthetic
cucauccauuaccaguguucag

SEQ ID NO: 7498 - RNA, 22 nt, Artificial Sequence
  Synthetic
cucugaacacugguaauggaug

SEQ ID NO: 7499 - RNA, 22 nt, Artificial Sequence
  Synthetic
cucuggucucauccauuaccag

SEQ ID NO: 7500 - RNA, 22 nt, Artificial Sequence
  Synthetic
cugaacacugguaauggaugag

SEQ ID NO: 7501 - RNA, 22 nt, Artificial Sequence
  Synthetic
cugguaauggaugagaccagag

SEQ ID NO: 7502 - RNA, 22 nt, Artificial Sequence
  Synthetic
cuggucucauccauuaccagug

SEQ ID NO: 7503 - RNA, 22 nt, Artificial Sequence
  Synthetic
gaacacugguaauggaugagac

SEQ ID NO: 7504 - RNA, 22 nt, Artificial Sequence
  Synthetic
gaagacauagucucugaacacu

SEQ ID NO: 7505 - RNA, 22 nt, Artificial Sequence
  Synthetic
gacauagucucugaacacuggu

SEQ ID NO: 7506 - RNA, 22 nt, Artificial Sequence
  Synthetic
ggaagacauagucucugaacac

SEQ ID NO: 7507 - RNA, 22 nt, Artificial Sequence
  Synthetic
ggucucauccauuaccaguguu

SEQ ID NO: 7508 - RNA, 22 nt, Artificial Sequence
  Synthetic
gucucauccauuaccaguguuc

SEQ ID NO: 7509 - RNA, 22 nt, Artificial Sequence
  Synthetic
gucucugaacacugguaaugga

SEQ ID NO: 7510 - RNA, 22 nt, Artificial Sequence
  Synthetic
uaccaguguucagagacuaugu

SEQ ID NO: 7511 - RNA, 22 nt, Artificial Sequence
  Synthetic
uagucucugaacacugguaaug

SEQ ID NO: 7512 - RNA, 22 nt, Artificial Sequence
  Synthetic
ucauccauuaccaguguucaga

SEQ ID NO: 7513 - RNA, 22 nt, Artificial Sequence
  Synthetic
uccauuaccaguguucagagac

SEQ ID NO: 7514 - RNA, 22 nt, Artificial Sequence
  Synthetic
ucucauccauuaccaguguuca

SEQ ID NO: 7515 - RNA, 22 nt, Artificial Sequence
  Synthetic
ucucugaacacugguaauggau

SEQ ID NO: 7516 - RNA, 22 nt, Artificial Sequence
  Synthetic
ucucuggucucauccauuacca

SEQ ID NO: 7517 - RNA, 22 nt, Artificial Sequence
  Synthetic
ucugaacacugguaauggauga

SEQ ID NO: 7518 - RNA, 22 nt, Artificial Sequence
  Synthetic
ucuggucucauccauuaccagu

SEQ ID NO: 7519 - RNA, 22 nt, Artificial Sequence
  Synthetic
ugaacacugguaauggaugaga

SEQ ID NO: 7520 - RNA, 22 nt, Artificial Sequence
  Synthetic
ugguaauggaugagaccagaga

SEQ ID NO: 7521 - RNA, 22 nt, Artificial Sequence
  Synthetic
uggucucauccauuaccagugu

SEQ ID NO: 7522 - RNA, 22 nt, Artificial Sequence
  Synthetic
uuaccaguguucagagacuaug

SEQ ID NO: 7523 - RNA, 20 nt, Artificial Sequence
  Synthetic
aacacuggugcauggaugag

SEQ ID NO: 7524 - RNA, 20 nt, Artificial Sequence
  Synthetic
acacuggugcauggaugaga

SEQ ID NO: 7525 - RNA, 20 nt, Artificial Sequence
  Synthetic
accaucucuggucucaucca

SEQ ID NO: 7526 - RNA, 20 nt, Artificial Sequence
  Synthetic
acuggugcauggaugagacc

SEQ ID NO: 7527 - RNA, 20 nt, Artificial Sequence
  Synthetic
agucucugaacacuggugca

SEQ ID NO: 7528 - RNA, 20 nt, Artificial Sequence
  Synthetic
auagucucugaacacuggug

SEQ ID NO: 7529 - RNA, 20 nt, Artificial Sequence
  Synthetic
auccaugcaccaguguucag

SEQ ID NO: 7530 - RNA, 20 nt, Artificial Sequence
  Synthetic
aucucuggucucauccaugc

SEQ ID NO: 7531 - RNA, 20 nt, Artificial Sequence
  Synthetic
augcaccaguguucagagac

SEQ ID NO: 7532 - RNA, 20 nt, Artificial Sequence
  Synthetic
caccaucucuggucucaucc

SEQ ID NO: 7533 - RNA, 20 nt, Artificial Sequence
  Synthetic
cacuggugcauggaugagac

SEQ ID NO: 7534 - RNA, 20 nt, Artificial Sequence
  Synthetic
cauccaugcaccaguguuca

SEQ ID NO: 7535 - RNA, 20 nt, Artificial Sequence
  Synthetic
caucucuggucucauccaug

SEQ ID NO: 7536 - RNA, 20 nt, Artificial Sequence
  Synthetic
caugcaccaguguucagaga

SEQ ID NO: 7537 - RNA, 20 nt, Artificial Sequence
  Synthetic
ccaugcaccaguguucagag

SEQ ID NO: 7538 - RNA, 20 nt, Artificial Sequence
  Synthetic
cucauccaugcaccaguguu

SEQ ID NO: 7539 - RNA, 20 nt, Artificial Sequence
  Synthetic
cucugaacacuggugcaugg

SEQ ID NO: 7540 - RNA, 20 nt, Artificial Sequence
  Synthetic
cucuggucucauccaugcac

SEQ ID NO: 7541 - RNA, 20 nt, Artificial Sequence
  Synthetic
cugaacacuggugcauggau

SEQ ID NO: 7542 - RNA, 20 nt, Artificial Sequence
  Synthetic
cuggucucauccaugcacca

SEQ ID NO: 7543 - RNA, 20 nt, Artificial Sequence
  Synthetic
cuggugcauggaugagacca

SEQ ID NO: 7544 - RNA, 20 nt, Artificial Sequence
  Synthetic
gaacacuggugcauggauga

SEQ ID NO: 7545 - RNA, 20 nt, Artificial Sequence
  Synthetic
gcauggaugagaccagagau

SEQ ID NO: 7546 - RNA, 20 nt, Artificial Sequence
  Synthetic
ggucucauccaugcaccagu

SEQ ID NO: 7547 - RNA, 20 nt, Artificial Sequence
  Synthetic
ggugcauggaugagaccaga

SEQ ID NO: 7548 - RNA, 20 nt, Artificial Sequence
  Synthetic
gucucauccaugcaccagug

SEQ ID NO: 7549 - RNA, 20 nt, Artificial Sequence
  Synthetic
gucucugaacacuggugcau

SEQ ID NO: 7550 - RNA, 20 nt, Artificial Sequence
  Synthetic
gugcauggaugagaccagag

SEQ ID NO: 7551 - RNA, 20 nt, Artificial Sequence
  Synthetic
uagucucugaacacuggugc

SEQ ID NO: 7552 - RNA, 20 nt, Artificial Sequence
  Synthetic
ucaccaucucuggucucauc

SEQ ID NO: 7553 - RNA, 20 nt, Artificial Sequence
  Synthetic
ucauccaugcaccaguguuc

SEQ ID NO: 7554 - RNA, 20 nt, Artificial Sequence
  Synthetic
uccaugcaccaguguucaga

SEQ ID NO: 7555 - RNA, 20 nt, Artificial Sequence
  Synthetic
ucucauccaugcaccagugu

SEQ ID NO: 7556 - RNA, 20 nt, Artificial Sequence
  Synthetic
ucucugaacacuggugcaug

SEQ ID NO: 7557 - RNA, 20 nt, Artificial Sequence
  Synthetic
ucucuggucucauccaugca

SEQ ID NO: 7558 - RNA, 20 nt, Artificial Sequence
  Synthetic
ucugaacacuggugcaugga

SEQ ID NO: 7559 - RNA, 20 nt, Artificial Sequence
  Synthetic
ucuggucucauccaugcacc

SEQ ID NO: 7560 - RNA, 20 nt, Artificial Sequence
  Synthetic
ugaacacuggugcauggaug

SEQ ID NO: 7561 - RNA, 20 nt, Artificial Sequence
  Synthetic
ugcaccaguguucagagacu

SEQ ID NO: 7562 - RNA, 20 nt, Artificial Sequence
  Synthetic
ugcauggaugagaccagaga

SEQ ID NO: 7563 - RNA, 20 nt, Artificial Sequence
  Synthetic
uggucucauccaugcaccag

SEQ ID NO: 7564 - RNA, 20 nt, Artificial Sequence
  Synthetic
uggugcauggaugagaccag

SEQ ID NO: 7565 - RNA, 21 nt, Artificial Sequence
  Synthetic
aacacuggugcauggaugaga

SEQ ID NO: 7566 - RNA, 21 nt, Artificial Sequence
  Synthetic
acacuggugcauggaugagac

SEQ ID NO: 7567 - RNA, 21 nt, Artificial Sequence
  Synthetic
acuggugcauggaugagacca

SEQ ID NO: 7568 - RNA, 21 nt, Artificial Sequence
  Synthetic
agucucugaacacuggugcau

SEQ ID NO: 7569 - RNA, 21 nt, Artificial Sequence
  Synthetic
auagucucugaacacuggugc

SEQ ID NO: 7570 - RNA, 21 nt, Artificial Sequence
  Synthetic
auccaugcaccaguguucaga

SEQ ID NO: 7571 - RNA, 21 nt, Artificial Sequence
  Synthetic
aucucuggucucauccaugca

SEQ ID NO: 7572 - RNA, 21 nt, Artificial Sequence
  Synthetic
augcaccaguguucagagacu

SEQ ID NO: 7573 - RNA, 21 nt, Artificial Sequence
  Synthetic
caccaucucuggucucaucca

SEQ ID NO: 7574 - RNA, 21 nt, Artificial Sequence
  Synthetic
cacuggugcauggaugagacc

SEQ ID NO: 7575 - RNA, 21 nt, Artificial Sequence
  Synthetic
cauagucucugaacacuggug

SEQ ID NO: 7576 - RNA, 21 nt, Artificial Sequence
  Synthetic
cauccaugcaccaguguucag

SEQ ID NO: 7577 - RNA, 21 nt, Artificial Sequence
  Synthetic
caucucuggucucauccaugc

SEQ ID NO: 7578 - RNA, 21 nt, Artificial Sequence
  Synthetic
caugcaccaguguucagagac

SEQ ID NO: 7579 - RNA, 21 nt, Artificial Sequence
  Synthetic
ccaucucuggucucauccaug

SEQ ID NO: 7580 - RNA, 21 nt, Artificial Sequence
  Synthetic
ccaugcaccaguguucagaga

SEQ ID NO: 7581 - RNA, 21 nt, Artificial Sequence
  Synthetic
cucauccaugcaccaguguuc

SEQ ID NO: 7582 - RNA, 21 nt, Artificial Sequence
  Synthetic
cucugaacacuggugcaugga

SEQ ID NO: 7583 - RNA, 21 nt, Artificial Sequence
  Synthetic
cucuggucucauccaugcacc

SEQ ID NO: 7584 - RNA, 21 nt, Artificial Sequence
  Synthetic
cugaacacuggugcauggaug

SEQ ID NO: 7585 - RNA, 21 nt, Artificial Sequence
  Synthetic
cuggucucauccaugcaccag

SEQ ID NO: 7586 - RNA, 21 nt, Artificial Sequence
  Synthetic
cuggugcauggaugagaccag

SEQ ID NO: 7587 - RNA, 21 nt, Artificial Sequence
  Synthetic
gaacacuggugcauggaugag

SEQ ID NO: 7588 - RNA, 21 nt, Artificial Sequence
  Synthetic
gcauggaugagaccagagaug

SEQ ID NO: 7589 - RNA, 21 nt, Artificial Sequence
  Synthetic
ggucucauccaugcaccagug

SEQ ID NO: 7590 - RNA, 21 nt, Artificial Sequence
  Synthetic
ggugcauggaugagaccagag

SEQ ID NO: 7591 - RNA, 21 nt, Artificial Sequence
  Synthetic
gucucauccaugcaccagugu

SEQ ID NO: 7592 - RNA, 21 nt, Artificial Sequence
  Synthetic
gucucugaacacuggugcaug

SEQ ID NO: 7593 - RNA, 21 nt, Artificial Sequence
  Synthetic
gugcauggaugagaccagaga

SEQ ID NO: 7594 - RNA, 21 nt, Artificial Sequence
  Synthetic
uagucucugaacacuggugca

SEQ ID NO: 7595 - RNA, 21 nt, Artificial Sequence
  Synthetic
ucaccaucucuggucucaucc

SEQ ID NO: 7596 - RNA, 21 nt, Artificial Sequence
  Synthetic
ucauccaugcaccaguguuca

SEQ ID NO: 7597 - RNA, 21 nt, Artificial Sequence
  Synthetic
uccaugcaccaguguucagag

SEQ ID NO: 7598 - RNA, 21 nt, Artificial Sequence
  Synthetic
ucucauccaugcaccaguguu

SEQ ID NO: 7599 - RNA, 21 nt, Artificial Sequence
  Synthetic
ucucugaacacuggugcaugg

SEQ ID NO: 7600 - RNA, 21 nt, Artificial Sequence
  Synthetic
ucucuggucucauccaugcac

SEQ ID NO: 7601 - RNA, 21 nt, Artificial Sequence
  Synthetic
ucugaacacuggugcauggau

SEQ ID NO: 7602 - RNA, 21 nt, Artificial Sequence
  Synthetic
ucuggucucauccaugcacca

SEQ ID NO: 7603 - RNA, 21 nt, Artificial Sequence
  Synthetic
ugaacacuggugcauggauga

SEQ ID NO: 7604 - RNA, 21 nt, Artificial Sequence
  Synthetic
ugcaccaguguucagagacua

SEQ ID NO: 7605 - RNA, 21 nt, Artificial Sequence
  Synthetic
ugcauggaugagaccagagau

SEQ ID NO: 7606 - RNA, 21 nt, Artificial Sequence
  Synthetic
uggucucauccaugcaccagu

SEQ ID NO: 7607 - RNA, 21 nt, Artificial Sequence
  Synthetic
uggugcauggaugagaccaga

SEQ ID NO: 7608 - RNA, 21 nt, Artificial Sequence
  Synthetic
uucaccaucucuggucucauc

SEQ ID NO: 7609 - RNA, 22 nt, Artificial Sequence
  Synthetic
aacacuggugcauggaugagac

SEQ ID NO: 7610 - RNA, 22 nt, Artificial Sequence
  Synthetic
acacuggugcauggaugagacc

SEQ ID NO: 7611 - RNA, 22 nt, Artificial Sequence
  Synthetic
acauagucucugaacacuggug

SEQ ID NO: 7612 - RNA, 22 nt, Artificial Sequence
  Synthetic
accaucucuggucucauccaug

SEQ ID NO: 7613 - RNA, 22 nt, Artificial Sequence
  Synthetic
acuggugcauggaugagaccag

SEQ ID NO: 7614 - RNA, 22 nt, Artificial Sequence
  Synthetic
agucucugaacacuggugcaug

SEQ ID NO: 7615 - RNA, 22 nt, Artificial Sequence
  Synthetic
auagucucugaacacuggugca

SEQ ID NO: 7616 - RNA, 22 nt, Artificial Sequence
  Synthetic
auccaugcaccaguguucagag

SEQ ID NO: 7617 - RNA, 22 nt, Artificial Sequence
  Synthetic
aucucuggucucauccaugcac

SEQ ID NO: 7618 - RNA, 22 nt, Artificial Sequence
  Synthetic
augcaccaguguucagagacua

SEQ ID NO: 7619 - RNA, 22 nt, Artificial Sequence
  Synthetic
cacuggugcauggaugagacca

SEQ ID NO: 7620 - RNA, 22 nt, Artificial Sequence
  Synthetic
cauagucucugaacacuggugc

SEQ ID NO: 7621 - RNA, 22 nt, Artificial Sequence
  Synthetic
cauccaugcaccaguguucaga

SEQ ID NO: 7622 - RNA, 22 nt, Artificial Sequence
  Synthetic
caucucuggucucauccaugca

SEQ ID NO: 7623 - RNA, 22 nt, Artificial Sequence
  Synthetic
caugcaccaguguucagagacu

SEQ ID NO: 7624 - RNA, 22 nt, Artificial Sequence
  Synthetic
ccaucucuggucucauccaugc

SEQ ID NO: 7625 - RNA, 22 nt, Artificial Sequence
  Synthetic
ccaugcaccaguguucagagac

SEQ ID NO: 7626 - RNA, 22 nt, Artificial Sequence
  Synthetic
cucauccaugcaccaguguuca

SEQ ID NO: 7627 - RNA, 22 nt, Artificial Sequence
  Synthetic
cucugaacacuggugcauggau

SEQ ID NO: 7628 - RNA, 22 nt, Artificial Sequence
  Synthetic
cucuggucucauccaugcacca

SEQ ID NO: 7629 - RNA, 22 nt, Artificial Sequence
  Synthetic
cugaacacuggugcauggauga

SEQ ID NO: 7630 - RNA, 22 nt, Artificial Sequence
  Synthetic
cuggucucauccaugcaccagu

SEQ ID NO: 7631 - RNA, 22 nt, Artificial Sequence
  Synthetic
cuggugcauggaugagaccaga

SEQ ID NO: 7632 - RNA, 22 nt, Artificial Sequence
  Synthetic
cuucaccaucucuggucucauc

SEQ ID NO: 7633 - RNA, 22 nt, Artificial Sequence
  Synthetic
gaacacuggugcauggaugaga

SEQ ID NO: 7634 - RNA, 22 nt, Artificial Sequence
  Synthetic
gcauggaugagaccagagaugg

SEQ ID NO: 7635 - RNA, 22 nt, Artificial Sequence
  Synthetic
ggucucauccaugcaccagugu

SEQ ID NO: 7636 - RNA, 22 nt, Artificial Sequence
  Synthetic
ggugcauggaugagaccagaga

SEQ ID NO: 7637 - RNA, 22 nt, Artificial Sequence
  Synthetic
gucucauccaugcaccaguguu

SEQ ID NO: 7638 - RNA, 22 nt, Artificial Sequence
  Synthetic
gucucugaacacuggugcaugg

SEQ ID NO: 7639 - RNA, 22 nt, Artificial Sequence
  Synthetic
gugcauggaugagaccagagau

SEQ ID NO: 7640 - RNA, 22 nt, Artificial Sequence
  Synthetic
uagucucugaacacuggugcau

SEQ ID NO: 7641 - RNA, 22 nt, Artificial Sequence
  Synthetic
ucaccaucucuggucucaucca

SEQ ID NO: 7642 - RNA, 22 nt, Artificial Sequence
  Synthetic
ucauccaugcaccaguguucag

SEQ ID NO: 7643 - RNA, 22 nt, Artificial Sequence
  Synthetic
uccaugcaccaguguucagaga

SEQ ID NO: 7644 - RNA, 22 nt, Artificial Sequence
  Synthetic
ucucauccaugcaccaguguuc

SEQ ID NO: 7645 - RNA, 22 nt, Artificial Sequence
  Synthetic
ucucugaacacuggugcaugga

SEQ ID NO: 7646 - RNA, 22 nt, Artificial Sequence
  Synthetic
ucucuggucucauccaugcacc

SEQ ID NO: 7647 - RNA, 22 nt, Artificial Sequence
  Synthetic
ucugaacacuggugcauggaug

SEQ ID NO: 7648 - RNA, 22 nt, Artificial Sequence
  Synthetic
ucuggucucauccaugcaccag

SEQ ID NO: 7649 - RNA, 22 nt, Artificial Sequence
  Synthetic
ugaacacuggugcauggaugag

SEQ ID NO: 7650 - RNA, 22 nt, Artificial Sequence
  Synthetic
ugcaccaguguucagagacuau

SEQ ID NO: 7651 - RNA, 22 nt, Artificial Sequence
  Synthetic
ugcauggaugagaccagagaug

SEQ ID NO: 7652 - RNA, 22 nt, Artificial Sequence
  Synthetic
uggucucauccaugcaccagug

SEQ ID NO: 7653 - RNA, 22 nt, Artificial Sequence
  Synthetic
uggugcauggaugagaccagag

SEQ ID NO: 7654 - RNA, 22 nt, Artificial Sequence
  Synthetic
uucaccaucucuggucucaucc

SEQ ID NO: 7655 - RNA, 20 nt, Artificial Sequence
  Synthetic
aaaucaccuccaggugcugg

SEQ ID NO: 7656 - RNA, 20 nt, Artificial Sequence
  Synthetic
aaucaccuccaggugcuggg

SEQ ID NO: 7657 - RNA, 20 nt, Artificial Sequence
  Synthetic
acccagcaccuggaggugau

SEQ ID NO: 7658 - RNA, 20 nt, Artificial Sequence
  Synthetic
accuccaggugcugggucac

SEQ ID NO: 7659 - RNA, 20 nt, Artificial Sequence
  Synthetic
accuggaggugauuuacaca

SEQ ID NO: 7660 - RNA, 20 nt, Artificial Sequence
  Synthetic
acucuggugacccagcaccu

SEQ ID NO: 7661 - RNA, 20 nt, Artificial Sequence
  Synthetic
agcaccuggaggugauuuac

SEQ ID NO: 7662 - RNA, 20 nt, Artificial Sequence
  Synthetic
aucaccuccaggugcugggu

SEQ ID NO: 7663 - RNA, 20 nt, Artificial Sequence
  Synthetic
caccuccaggugcuggguca

SEQ ID NO: 7664 - RNA, 20 nt, Artificial Sequence
  Synthetic
caccuggaggugauuuacac

SEQ ID NO: 7665 - RNA, 20 nt, Artificial Sequence
  Synthetic
cacucuggugacccagcacc

SEQ ID NO: 7666 - RNA, 20 nt, Artificial Sequence
  Synthetic
cagcaccuggaggugauuua

SEQ ID NO: 7667 - RNA, 20 nt, Artificial Sequence
  Synthetic
caggugcugggucaccagag

SEQ ID NO: 7668 - RNA, 20 nt, Artificial Sequence
  Synthetic
ccagcaccuggaggugauuu

SEQ ID NO: 7669 - RNA, 20 nt, Artificial Sequence
  Synthetic
ccaggugcugggucaccaga

SEQ ID NO: 7670 - RNA, 20 nt, Artificial Sequence
  Synthetic
cccagcaccuggaggugauu

SEQ ID NO: 7671 - RNA, 20 nt, Artificial Sequence
  Synthetic
ccuccaggugcugggucacc

SEQ ID NO: 7672 - RNA, 20 nt, Artificial Sequence
  Synthetic
ccuggaggugauuuacacaa

SEQ ID NO: 7673 - RNA, 20 nt, Artificial Sequence
  Synthetic
cuccaggugcugggucacca

SEQ ID NO: 7674 - RNA, 20 nt, Artificial Sequence
  Synthetic
cucuggugacccagcaccug

SEQ ID NO: 7675 - RNA, 20 nt, Artificial Sequence
  Synthetic
cuggaggugauuuacacaaa

SEQ ID NO: 7676 - RNA, 20 nt, Artificial Sequence
  Synthetic
cuggugacccagcaccugga

SEQ ID NO: 7677 - RNA, 20 nt, Artificial Sequence
  Synthetic
gacccagcaccuggagguga

SEQ ID NO: 7678 - RNA, 20 nt, Artificial Sequence
  Synthetic
gcaccuggaggugauuuaca

SEQ ID NO: 7679 - RNA, 20 nt, Artificial Sequence
  Synthetic
ggugacccagcaccuggagg

SEQ ID NO: 7680 - RNA, 20 nt, Artificial Sequence
  Synthetic
gguuuguguaaaucaccucc

SEQ ID NO: 7681 - RNA, 20 nt, Artificial Sequence
  Synthetic
guaaaucaccuccaggugcu

SEQ ID NO: 7682 - RNA, 20 nt, Artificial Sequence
  Synthetic
gugacccagcaccuggaggu

SEQ ID NO: 7683 - RNA, 20 nt, Artificial Sequence
  Synthetic
guguaaaucaccuccaggug

SEQ ID NO: 7684 - RNA, 20 nt, Artificial Sequence
  Synthetic
guuuguguaaaucaccucca

SEQ ID NO: 7685 - RNA, 20 nt, Artificial Sequence
  Synthetic
uaaaucaccuccaggugcug

SEQ ID NO: 7686 - RNA, 20 nt, Artificial Sequence
  Synthetic
ucaccuccaggugcuggguc

SEQ ID NO: 7687 - RNA, 20 nt, Artificial Sequence
  Synthetic
ucacucuggugacccagcac

SEQ ID NO: 7688 - RNA, 20 nt, Artificial Sequence
  Synthetic
uccaggugcugggucaccag

SEQ ID NO: 7689 - RNA, 20 nt, Artificial Sequence
  Synthetic
ucuggugacccagcaccugg

SEQ ID NO: 7690 - RNA, 20 nt, Artificial Sequence
  Synthetic
ugacccagcaccuggaggug

SEQ ID NO: 7691 - RNA, 20 nt, Artificial Sequence
  Synthetic
uggugacccagcaccuggag

SEQ ID NO: 7692 - RNA, 20 nt, Artificial Sequence
  Synthetic
ugguuuguguaaaucaccuc

SEQ ID NO: 7693 - RNA, 20 nt, Artificial Sequence
  Synthetic
uguaaaucaccuccaggugc

SEQ ID NO: 7694 - RNA, 20 nt, Artificial Sequence
  Synthetic
uguguaaaucaccuccaggu

SEQ ID NO: 7695 - RNA, 20 nt, Artificial Sequence
  Synthetic
uucacucuggugacccagca

SEQ ID NO: 7696 - RNA, 20 nt, Artificial Sequence
  Synthetic
uugguuuguguaaaucaccu

SEQ ID NO: 7697 - RNA, 20 nt, Artificial Sequence
  Synthetic
uuguguaaaucaccuccagg

SEQ ID NO: 7698 - RNA, 20 nt, Artificial Sequence
  Synthetic
uuucacucuggugacccagc

SEQ ID NO: 7699 - RNA, 20 nt, Artificial Sequence
  Synthetic
uuugguuuguguaaaucacc

SEQ ID NO: 7700 - RNA, 20 nt, Artificial Sequence
  Synthetic
uuuguguaaaucaccuccag

SEQ ID NO: 7701 - RNA, 21 nt, Artificial Sequence
  Synthetic
aaaucaccuccaggugcuggg

SEQ ID NO: 7702 - RNA, 21 nt, Artificial Sequence
  Synthetic
aaucaccuccaggugcugggu

SEQ ID NO: 7703 - RNA, 21 nt, Artificial Sequence
  Synthetic
acccagcaccuggaggugauu

SEQ ID NO: 7704 - RNA, 21 nt, Artificial Sequence
  Synthetic
accuccaggugcugggucacc

SEQ ID NO: 7705 - RNA, 21 nt, Artificial Sequence
  Synthetic
accuggaggugauuuacacaa

SEQ ID NO: 7706 - RNA, 21 nt, Artificial Sequence
  Synthetic
acucuggugacccagcaccug

SEQ ID NO: 7707 - RNA, 21 nt, Artificial Sequence
  Synthetic
agcaccuggaggugauuuaca

SEQ ID NO: 7708 - RNA, 21 nt, Artificial Sequence
  Synthetic
aucaccuccaggugcuggguc

SEQ ID NO: 7709 - RNA, 21 nt, Artificial Sequence
  Synthetic
auuucacucuggugacccagc

SEQ ID NO: 7710 - RNA, 21 nt, Artificial Sequence
  Synthetic
caccuccaggugcugggucac

SEQ ID NO: 7711 - RNA, 21 nt, Artificial Sequence
  Synthetic
caccuggaggugauuuacaca

SEQ ID NO: 7712 - RNA, 21 nt, Artificial Sequence
  Synthetic
cacucuggugacccagcaccu

SEQ ID NO: 7713 - RNA, 21 nt, Artificial Sequence
  Synthetic
cagcaccuggaggugauuuac

SEQ ID NO: 7714 - RNA, 21 nt, Artificial Sequence
  Synthetic
caggugcugggucaccagagu

SEQ ID NO: 7715 - RNA, 21 nt, Artificial Sequence
  Synthetic
ccagcaccuggaggugauuua

SEQ ID NO: 7716 - RNA, 21 nt, Artificial Sequence
  Synthetic
ccaggugcugggucaccagag

SEQ ID NO: 7717 - RNA, 21 nt, Artificial Sequence
  Synthetic
cccagcaccuggaggugauuu

SEQ ID NO: 7718 - RNA, 21 nt, Artificial Sequence
  Synthetic
ccuccaggugcugggucacca

SEQ ID NO: 7719 - RNA, 21 nt, Artificial Sequence
  Synthetic
ccuggaggugauuuacacaaa

SEQ ID NO: 7720 - RNA, 21 nt, Artificial Sequence
  Synthetic
cuccaggugcugggucaccag

SEQ ID NO: 7721 - RNA, 21 nt, Artificial Sequence
  Synthetic
cucuggugacccagcaccugg

SEQ ID NO: 7722 - RNA, 21 nt, Artificial Sequence
  Synthetic
cuggaggugauuuacacaaac

SEQ ID NO: 7723 - RNA, 21 nt, Artificial Sequence
  Synthetic
cuggugacccagcaccuggag

SEQ ID NO: 7724 - RNA, 21 nt, Artificial Sequence
  Synthetic
gacccagcaccuggaggugau

SEQ ID NO: 7725 - RNA, 21 nt, Artificial Sequence
  Synthetic
gcaccuggaggugauuuacac

SEQ ID NO: 7726 - RNA, 21 nt, Artificial Sequence
  Synthetic
ggugacccagcaccuggaggu

SEQ ID NO: 7727 - RNA, 21 nt, Artificial Sequence
  Synthetic
gguuuguguaaaucaccucca

SEQ ID NO: 7728 - RNA, 21 nt, Artificial Sequence
  Synthetic
guaaaucaccuccaggugcug

SEQ ID NO: 7729 - RNA, 21 nt, Artificial Sequence
  Synthetic
gugacccagcaccuggaggug

SEQ ID NO: 7730 - RNA, 21 nt, Artificial Sequence
  Synthetic
guguaaaucaccuccaggugc

SEQ ID NO: 7731 - RNA, 21 nt, Artificial Sequence
  Synthetic
guuuguguaaaucaccuccag

SEQ ID NO: 7732 - RNA, 21 nt, Artificial Sequence
  Synthetic
uaaaucaccuccaggugcugg

SEQ ID NO: 7733 - RNA, 21 nt, Artificial Sequence
  Synthetic
ucaccuccaggugcuggguca

SEQ ID NO: 7734 - RNA, 21 nt, Artificial Sequence
  Synthetic
ucacucuggugacccagcacc

SEQ ID NO: 7735 - RNA, 21 nt, Artificial Sequence
  Synthetic
uccaggugcugggucaccaga

SEQ ID NO: 7736 - RNA, 21 nt, Artificial Sequence
  Synthetic
ucuggugacccagcaccugga

SEQ ID NO: 7737 - RNA, 21 nt, Artificial Sequence
  Synthetic
ugacccagcaccuggagguga

SEQ ID NO: 7738 - RNA, 21 nt, Artificial Sequence
  Synthetic
uggugacccagcaccuggagg

SEQ ID NO: 7739 - RNA, 21 nt, Artificial Sequence
  Synthetic
ugguuuguguaaaucaccucc

SEQ ID NO: 7740 - RNA, 21 nt, Artificial Sequence
  Synthetic
uguaaaucaccuccaggugcu

SEQ ID NO: 7741 - RNA, 21 nt, Artificial Sequence
  Synthetic
uguguaaaucaccuccaggug

SEQ ID NO: 7742 - RNA, 21 nt, Artificial Sequence
  Synthetic
uucacucuggugacccagcac

SEQ ID NO: 7743 - RNA, 21 nt, Artificial Sequence
  Synthetic
uugguuuguguaaaucaccuc

SEQ ID NO: 7744 - RNA, 21 nt, Artificial Sequence
  Synthetic
uuguguaaaucaccuccaggu

SEQ ID NO: 7745 - RNA, 21 nt, Artificial Sequence
  Synthetic
uuucacucuggugacccagca

SEQ ID NO: 7746 - RNA, 21 nt, Artificial Sequence
  Synthetic
uuugguuuguguaaaucaccu

SEQ ID NO: 7747 - RNA, 21 nt, Artificial Sequence
  Synthetic
uuuguguaaaucaccuccagg

SEQ ID NO: 7748 - RNA, 21 nt, Artificial Sequence
  Synthetic
uuuugguuuguguaaaucacc

SEQ ID NO: 7749 - RNA, 22 nt, Artificial Sequence
  Synthetic
aaaucaccuccaggugcugggu

SEQ ID NO: 7750 - RNA, 22 nt, Artificial Sequence
  Synthetic
aaucaccuccaggugcuggguc

SEQ ID NO: 7751 - RNA, 22 nt, Artificial Sequence
  Synthetic
aauuucacucuggugacccagc

SEQ ID NO: 7752 - RNA, 22 nt, Artificial Sequence
  Synthetic
acccagcaccuggaggugauuu

SEQ ID NO: 7753 - RNA, 22 nt, Artificial Sequence
  Synthetic
accuccaggugcugggucacca

SEQ ID NO: 7754 - RNA, 22 nt, Artificial Sequence
  Synthetic
accuggaggugauuuacacaaa

SEQ ID NO: 7755 - RNA, 22 nt, Artificial Sequence
  Synthetic
acucuggugacccagcaccugg

SEQ ID NO: 7756 - RNA, 22 nt, Artificial Sequence
  Synthetic
agcaccuggaggugauuuacac

SEQ ID NO: 7757 - RNA, 22 nt, Artificial Sequence
  Synthetic
aucaccuccaggugcuggguca

SEQ ID NO: 7758 - RNA, 22 nt, Artificial Sequence
  Synthetic
auuucacucuggugacccagca

SEQ ID NO: 7759 - RNA, 22 nt, Artificial Sequence
  Synthetic
auuuugguuuguguaaaucacc

SEQ ID NO: 7760 - RNA, 22 nt, Artificial Sequence
  Synthetic
caccuccaggugcugggucacc

SEQ ID NO: 7761 - RNA, 22 nt, Artificial Sequence
  Synthetic
caccuggaggugauuuacacaa

SEQ ID NO: 7762 - RNA, 22 nt, Artificial Sequence
  Synthetic
cacucuggugacccagcaccug

SEQ ID NO: 7763 - RNA, 22 nt, Artificial Sequence
  Synthetic
cagcaccuggaggugauuuaca

SEQ ID NO: 7764 - RNA, 22 nt, Artificial Sequence
  Synthetic
caggugcugggucaccagagug

SEQ ID NO: 7765 - RNA, 22 nt, Artificial Sequence
  Synthetic
ccagcaccuggaggugauuuac

SEQ ID NO: 7766 - RNA, 22 nt, Artificial Sequence
  Synthetic
ccaggugcugggucaccagagu

SEQ ID NO: 7767 - RNA, 22 nt, Artificial Sequence
  Synthetic
cccagcaccuggaggugauuua

SEQ ID NO: 7768 - RNA, 22 nt, Artificial Sequence
  Synthetic
ccuccaggugcugggucaccag

SEQ ID NO: 7769 - RNA, 22 nt, Artificial Sequence
  Synthetic
ccuggaggugauuuacacaaac

SEQ ID NO: 7770 - RNA, 22 nt, Artificial Sequence
  Synthetic
cuccaggugcugggucaccaga

SEQ ID NO: 7771 - RNA, 22 nt, Artificial Sequence
  Synthetic
cucuggugacccagcaccugga

SEQ ID NO: 7772 - RNA, 22 nt, Artificial Sequence
  Synthetic
cuggaggugauuuacacaaacc

SEQ ID NO: 7773 - RNA, 22 nt, Artificial Sequence
  Synthetic
cuggugacccagcaccuggagg

SEQ ID NO: 7774 - RNA, 22 nt, Artificial Sequence
  Synthetic
gacccagcaccuggaggugauu

SEQ ID NO: 7775 - RNA, 22 nt, Artificial Sequence
  Synthetic
gcaccuggaggugauuuacaca

SEQ ID NO: 7776 - RNA, 22 nt, Artificial Sequence
  Synthetic
ggugacccagcaccuggaggug

SEQ ID NO: 7777 - RNA, 22 nt, Artificial Sequence
  Synthetic
gguuuguguaaaucaccuccag

SEQ ID NO: 7778 - RNA, 22 nt, Artificial Sequence
  Synthetic
guaaaucaccuccaggugcugg

SEQ ID NO: 7779 - RNA, 22 nt, Artificial Sequence
  Synthetic
gugacccagcaccuggagguga

SEQ ID NO: 7780 - RNA, 22 nt, Artificial Sequence
  Synthetic
guguaaaucaccuccaggugcu

SEQ ID NO: 7781 - RNA, 22 nt, Artificial Sequence
  Synthetic
guuuguguaaaucaccuccagg

SEQ ID NO: 7782 - RNA, 22 nt, Artificial Sequence
  Synthetic
uaaaucaccuccaggugcuggg

SEQ ID NO: 7783 - RNA, 22 nt, Artificial Sequence
  Synthetic
ucaccuccaggugcugggucac

SEQ ID NO: 7784 - RNA, 22 nt, Artificial Sequence
  Synthetic
ucacucuggugacccagcaccu

SEQ ID NO: 7785 - RNA, 22 nt, Artificial Sequence
  Synthetic
uccaggugcugggucaccagag

SEQ ID NO: 7786 - RNA, 22 nt, Artificial Sequence
  Synthetic
ucuggugacccagcaccuggag

SEQ ID NO: 7787 - RNA, 22 nt, Artificial Sequence
  Synthetic
ugacccagcaccuggaggugau

SEQ ID NO: 7788 - RNA, 22 nt, Artificial Sequence
  Synthetic
uggugacccagcaccuggaggu

SEQ ID NO: 7789 - RNA, 22 nt, Artificial Sequence
  Synthetic
ugguuuguguaaaucaccucca

SEQ ID NO: 7790 - RNA, 22 nt, Artificial Sequence
  Synthetic
uguaaaucaccuccaggugcug

SEQ ID NO: 7791 - RNA, 22 nt, Artificial Sequence
  Synthetic
uguguaaaucaccuccaggugc

SEQ ID NO: 7792 - RNA, 22 nt, Artificial Sequence
  Synthetic
uucacucuggugacccagcacc

SEQ ID NO: 7793 - RNA, 22 nt, Artificial Sequence
  Synthetic
uugguuuguguaaaucaccucc

SEQ ID NO: 7794 - RNA, 22 nt, Artificial Sequence
  Synthetic
uuguguaaaucaccuccaggug

SEQ ID NO: 7795 - RNA, 22 nt, Artificial Sequence
  Synthetic
uuucacucuggugacccagcac

SEQ ID NO: 7796 - RNA, 22 nt, Artificial Sequence
  Synthetic
uuugguuuguguaaaucaccuc

SEQ ID NO: 7797 - RNA, 22 nt, Artificial Sequence
  Synthetic
uuuguguaaaucaccuccaggu

SEQ ID NO: 7798 - RNA, 22 nt, Artificial Sequence
  Synthetic
uuuugguuuguguaaaucaccu

SEQ ID NO: 7799 - RNA, 20 nt, Artificial Sequence
  Synthetic
aauuucacuccggugaccca

SEQ ID NO: 7800 - RNA, 20 nt, Artificial Sequence
  Synthetic
accggagugaaauuccucag

SEQ ID NO: 7801 - RNA, 20 nt, Artificial Sequence
  Synthetic
accuccgggugcugggucac

SEQ ID NO: 7802 - RNA, 20 nt, Artificial Sequence
  Synthetic
acuccggugacccagcaccc

SEQ ID NO: 7803 - RNA, 20 nt, Artificial Sequence
  Synthetic
agcuugcugaggaauuucac

SEQ ID NO: 7804 - RNA, 20 nt, Artificial Sequence
  Synthetic
aggaauuucacuccggugac

SEQ ID NO: 7805 - RNA, 20 nt, Artificial Sequence
  Synthetic
auuucacuccggugacccag

SEQ ID NO: 7806 - RNA, 20 nt, Artificial Sequence
  Synthetic
caccggagugaaauuccuca

SEQ ID NO: 7807 - RNA, 20 nt, Artificial Sequence
  Synthetic
caccuccgggugcuggguca

SEQ ID NO: 7808 - RNA, 20 nt, Artificial Sequence
  Synthetic
cacuccggugacccagcacc

SEQ ID NO: 7809 - RNA, 20 nt, Artificial Sequence
  Synthetic
cagcuugcugaggaauuuca

SEQ ID NO: 7810 - RNA, 20 nt, Artificial Sequence
  Synthetic
ccggagugaaauuccucagc

SEQ ID NO: 7811 - RNA, 20 nt, Artificial Sequence
  Synthetic
ccgggugcugggucaccgga

SEQ ID NO: 7812 - RNA, 20 nt, Artificial Sequence
  Synthetic
ccggugacccagcacccgga

SEQ ID NO: 7813 - RNA, 20 nt, Artificial Sequence
  Synthetic
ccuccgggugcugggucacc

SEQ ID NO: 7814 - RNA, 20 nt, Artificial Sequence
  Synthetic
cggagugaaauuccucagca

SEQ ID NO: 7815 - RNA, 20 nt, Artificial Sequence
  Synthetic
cgggugcugggucaccggag

SEQ ID NO: 7816 - RNA, 20 nt, Artificial Sequence
  Synthetic
cuccgggugcugggucaccg

SEQ ID NO: 7817 - RNA, 20 nt, Artificial Sequence
  Synthetic
cuccggugacccagcacccg

SEQ ID NO: 7818 - RNA, 20 nt, Artificial Sequence
  Synthetic
cugaggaauuucacuccggu

SEQ ID NO: 7819 - RNA, 20 nt, Artificial Sequence
  Synthetic
cugggucaccggagugaaau

SEQ ID NO: 7820 - RNA, 20 nt, Artificial Sequence
  Synthetic
cuugcugaggaauuucacuc

SEQ ID NO: 7821 - RNA, 20 nt, Artificial Sequence
  Synthetic
gaauuucacuccggugaccc

SEQ ID NO: 7822 - RNA, 20 nt, Artificial Sequence
  Synthetic
gaggaauuucacuccgguga

SEQ ID NO: 7823 - RNA, 20 nt, Artificial Sequence
  Synthetic
gcugaggaauuucacuccgg

SEQ ID NO: 7824 - RNA, 20 nt, Artificial Sequence
  Synthetic
gcugggucaccggagugaaa

SEQ ID NO: 7825 - RNA, 20 nt, Artificial Sequence
  Synthetic
gcuugcugaggaauuucacu

SEQ ID NO: 7826 - RNA, 20 nt, Artificial Sequence
  Synthetic
ggaauuucacuccggugacc

SEQ ID NO: 7827 - RNA, 20 nt, Artificial Sequence
  Synthetic
gggucaccggagugaaauuc

SEQ ID NO: 7828 - RNA, 20 nt, Artificial Sequence
  Synthetic
gggugcugggucaccggagu

SEQ ID NO: 7829 - RNA, 20 nt, Artificial Sequence
  Synthetic
ggucaccggagugaaauucc

SEQ ID NO: 7830 - RNA, 20 nt, Artificial Sequence
  Synthetic
ggugcugggucaccggagug

SEQ ID NO: 7831 - RNA, 20 nt, Artificial Sequence
  Synthetic
gucaccggagugaaauuccu

SEQ ID NO: 7832 - RNA, 20 nt, Artificial Sequence
  Synthetic
gugcugggucaccggaguga

SEQ ID NO: 7833 - RNA, 20 nt, Artificial Sequence
  Synthetic
ucaccggagugaaauuccuc

SEQ ID NO: 7834 - RNA, 20 nt, Artificial Sequence
  Synthetic
ucaccuccgggugcuggguc

SEQ ID NO: 7835 - RNA, 20 nt, Artificial Sequence
  Synthetic
ucacuccggugacccagcac

SEQ ID NO: 7836 - RNA, 20 nt, Artificial Sequence
  Synthetic
uccgggugcugggucaccgg

SEQ ID NO: 7837 - RNA, 20 nt, Artificial Sequence
  Synthetic
uccggugacccagcacccgg

SEQ ID NO: 7838 - RNA, 20 nt, Artificial Sequence
  Synthetic
ugaggaauuucacuccggug

SEQ ID NO: 7839 - RNA, 20 nt, Artificial Sequence
  Synthetic
ugcugaggaauuucacuccg

SEQ ID NO: 7840 - RNA, 20 nt, Artificial Sequence
  Synthetic
ugcugggucaccggagugaa

SEQ ID NO: 7841 - RNA, 20 nt, Artificial Sequence
  Synthetic
ugggucaccggagugaaauu

SEQ ID NO: 7842 - RNA, 20 nt, Artificial Sequence
  Synthetic
uucacuccggugacccagca

SEQ ID NO: 7843 - RNA, 20 nt, Artificial Sequence
  Synthetic
uugcugaggaauuucacucc

SEQ ID NO: 7844 - RNA, 20 nt, Artificial Sequence
  Synthetic
uuucacuccggugacccagc

SEQ ID NO: 7845 - RNA, 21 nt, Artificial Sequence
  Synthetic
aauuucacuccggugacccag

SEQ ID NO: 7846 - RNA, 21 nt, Artificial Sequence
  Synthetic
acagcuugcugaggaauuuca

SEQ ID NO: 7847 - RNA, 21 nt, Artificial Sequence
  Synthetic
accggagugaaauuccucagc

SEQ ID NO: 7848 - RNA, 21 nt, Artificial Sequence
  Synthetic
accuccgggugcugggucacc

SEQ ID NO: 7849 - RNA, 21 nt, Artificial Sequence
  Synthetic
acuccggugacccagcacccg

SEQ ID NO: 7850 - RNA, 21 nt, Artificial Sequence
  Synthetic
agcuugcugaggaauuucacu

SEQ ID NO: 7851 - RNA, 21 nt, Artificial Sequence
  Synthetic
aggaauuucacuccggugacc

SEQ ID NO: 7852 - RNA, 21 nt, Artificial Sequence
  Synthetic
aucaccuccgggugcuggguc

SEQ ID NO: 7853 - RNA, 21 nt, Artificial Sequence
  Synthetic
auuucacuccggugacccagc

SEQ ID NO: 7854 - RNA, 21 nt, Artificial Sequence
  Synthetic
caccggagugaaauuccucag

SEQ ID NO: 7855 - RNA, 21 nt, Artificial Sequence
  Synthetic
caccuccgggugcugggucac

SEQ ID NO: 7856 - RNA, 21 nt, Artificial Sequence
  Synthetic
cacuccggugacccagcaccc

SEQ ID NO: 7857 - RNA, 21 nt, Artificial Sequence
  Synthetic
cagcuugcugaggaauuucac

SEQ ID NO: 7858 - RNA, 21 nt, Artificial Sequence
  Synthetic
ccggagugaaauuccucagca

SEQ ID NO: 7859 - RNA, 21 nt, Artificial Sequence
  Synthetic
ccgggugcugggucaccggag

SEQ ID NO: 7860 - RNA, 21 nt, Artificial Sequence
  Synthetic
ccggugacccagcacccggag

SEQ ID NO: 7861 - RNA, 21 nt, Artificial Sequence
  Synthetic
ccuccgggugcugggucaccg

SEQ ID NO: 7862 - RNA, 21 nt, Artificial Sequence
  Synthetic
cggagugaaauuccucagcaa

SEQ ID NO: 7863 - RNA, 21 nt, Artificial Sequence
  Synthetic
cgggugcugggucaccggagu

SEQ ID NO: 7864 - RNA, 21 nt, Artificial Sequence
  Synthetic
cuccgggugcugggucaccgg

SEQ ID NO: 7865 - RNA, 21 nt, Artificial Sequence
  Synthetic
cuccggugacccagcacccgg

SEQ ID NO: 7866 - RNA, 21 nt, Artificial Sequence
  Synthetic
cugaggaauuucacuccggug

SEQ ID NO: 7867 - RNA, 21 nt, Artificial Sequence
  Synthetic
cugggucaccggagugaaauu

SEQ ID NO: 7868 - RNA, 21 nt, Artificial Sequence
  Synthetic
cuugcugaggaauuucacucc

SEQ ID NO: 7869 - RNA, 21 nt, Artificial Sequence
  Synthetic
gaauuucacuccggugaccca

SEQ ID NO: 7870 - RNA, 21 nt, Artificial Sequence
  Synthetic
gaggaauuucacuccggugac

SEQ ID NO: 7871 - RNA, 21 nt, Artificial Sequence
  Synthetic
gcugaggaauuucacuccggu

SEQ ID NO: 7872 - RNA, 21 nt, Artificial Sequence
  Synthetic
gcugggucaccggagugaaau

SEQ ID NO: 7873 - RNA, 21 nt, Artificial Sequence
  Synthetic
gcuugcugaggaauuucacuc

SEQ ID NO: 7874 - RNA, 21 nt, Artificial Sequence
  Synthetic
ggaauuucacuccggugaccc

SEQ ID NO: 7875 - RNA, 21 nt, Artificial Sequence
  Synthetic
gggucaccggagugaaauucc

SEQ ID NO: 7876 - RNA, 21 nt, Artificial Sequence
  Synthetic
gggugcugggucaccggagug

SEQ ID NO: 7877 - RNA, 21 nt, Artificial Sequence
  Synthetic
ggucaccggagugaaauuccu

SEQ ID NO: 7878 - RNA, 21 nt, Artificial Sequence
  Synthetic
ggugcugggucaccggaguga

SEQ ID NO: 7879 - RNA, 21 nt, Artificial Sequence
  Synthetic
gucaccggagugaaauuccuc

SEQ ID NO: 7880 - RNA, 21 nt, Artificial Sequence
  Synthetic
gugcugggucaccggagugaa

SEQ ID NO: 7881 - RNA, 21 nt, Artificial Sequence
  Synthetic
ucaccggagugaaauuccuca

SEQ ID NO: 7882 - RNA, 21 nt, Artificial Sequence
  Synthetic
ucaccuccgggugcuggguca

SEQ ID NO: 7883 - RNA, 21 nt, Artificial Sequence
  Synthetic
ucacuccggugacccagcacc

SEQ ID NO: 7884 - RNA, 21 nt, Artificial Sequence
  Synthetic
uccgggugcugggucaccgga

SEQ ID NO: 7885 - RNA, 21 nt, Artificial Sequence
  Synthetic
uccggugacccagcacccgga

SEQ ID NO: 7886 - RNA, 21 nt, Artificial Sequence
  Synthetic
ugaggaauuucacuccgguga

SEQ ID NO: 7887 - RNA, 21 nt, Artificial Sequence
  Synthetic
ugcugaggaauuucacuccgg

SEQ ID NO: 7888 - RNA, 21 nt, Artificial Sequence
  Synthetic
ugcugggucaccggagugaaa

SEQ ID NO: 7889 - RNA, 21 nt, Artificial Sequence
  Synthetic
ugggucaccggagugaaauuc

SEQ ID NO: 7890 - RNA, 21 nt, Artificial Sequence
  Synthetic
uucacuccggugacccagcac

SEQ ID NO: 7891 - RNA, 21 nt, Artificial Sequence
  Synthetic
uugcugaggaauuucacuccg

SEQ ID NO: 7892 - RNA, 21 nt, Artificial Sequence
  Synthetic
uuucacuccggugacccagca

SEQ ID NO: 7893 - RNA, 22 nt, Artificial Sequence
  Synthetic
aaucaccuccgggugcuggguc

SEQ ID NO: 7894 - RNA, 22 nt, Artificial Sequence
  Synthetic
aauuucacuccggugacccagc

SEQ ID NO: 7895 - RNA, 22 nt, Artificial Sequence
  Synthetic
acagcuugcugaggaauuucac

SEQ ID NO: 7896 - RNA, 22 nt, Artificial Sequence
  Synthetic
accggagugaaauuccucagca

SEQ ID NO: 7897 - RNA, 22 nt, Artificial Sequence
  Synthetic
accuccgggugcugggucaccg

SEQ ID NO: 7898 - RNA, 22 nt, Artificial Sequence
  Synthetic
acuccggugacccagcacccgg

SEQ ID NO: 7899 - RNA, 22 nt, Artificial Sequence
  Synthetic
agcuugcugaggaauuucacuc

SEQ ID NO: 7900 - RNA, 22 nt, Artificial Sequence
  Synthetic
aggaauuucacuccggugaccc

SEQ ID NO: 7901 - RNA, 22 nt, Artificial Sequence
  Synthetic
aucaccuccgggugcuggguca

SEQ ID NO: 7902 - RNA, 22 nt, Artificial Sequence
  Synthetic
auuucacuccggugacccagca

SEQ ID NO: 7903 - RNA, 22 nt, Artificial Sequence
  Synthetic
caccggagugaaauuccucagc

SEQ ID NO: 7904 - RNA, 22 nt, Artificial Sequence
  Synthetic
caccuccgggugcugggucacc

SEQ ID NO: 7905 - RNA, 22 nt, Artificial Sequence
  Synthetic
cacuccggugacccagcacccg

SEQ ID NO: 7906 - RNA, 22 nt, Artificial Sequence
  Synthetic
cagcuugcugaggaauuucacu

SEQ ID NO: 7907 - RNA, 22 nt, Artificial Sequence
  Synthetic
ccggagugaaauuccucagcaa

SEQ ID NO: 7908 - RNA, 22 nt, Artificial Sequence
  Synthetic
ccgggugcugggucaccggagu

SEQ ID NO: 7909 - RNA, 22 nt, Artificial Sequence
  Synthetic
ccggugacccagcacccggagg

SEQ ID NO: 7910 - RNA, 22 nt, Artificial Sequence
  Synthetic
ccuccgggugcugggucaccgg

SEQ ID NO: 7911 - RNA, 22 nt, Artificial Sequence
  Synthetic
cggagugaaauuccucagcaag

SEQ ID NO: 7912 - RNA, 22 nt, Artificial Sequence
  Synthetic
cgggugcugggucaccggagug

SEQ ID NO: 7913 - RNA, 22 nt, Artificial Sequence
  Synthetic
cuccgggugcugggucaccgga

SEQ ID NO: 7914 - RNA, 22 nt, Artificial Sequence
  Synthetic
cuccggugacccagcacccgga

SEQ ID NO: 7915 - RNA, 22 nt, Artificial Sequence
  Synthetic
cugaggaauuucacuccgguga

SEQ ID NO: 7916 - RNA, 22 nt, Artificial Sequence
  Synthetic
cugggucaccggagugaaauuc

SEQ ID NO: 7917 - RNA, 22 nt, Artificial Sequence
  Synthetic
cuugcugaggaauuucacuccg

SEQ ID NO: 7918 - RNA, 22 nt, Artificial Sequence
  Synthetic
gaauuucacuccggugacccag

SEQ ID NO: 7919 - RNA, 22 nt, Artificial Sequence
  Synthetic
gacagcuugcugaggaauuuca

SEQ ID NO: 7920 - RNA, 22 nt, Artificial Sequence
  Synthetic
gaggaauuucacuccggugacc

SEQ ID NO: 7921 - RNA, 22 nt, Artificial Sequence
  Synthetic
gcugaggaauuucacuccggug

SEQ ID NO: 7922 - RNA, 22 nt, Artificial Sequence
  Synthetic
gcugggucaccggagugaaauu

SEQ ID NO: 7923 - RNA, 22 nt, Artificial Sequence
  Synthetic
gcuugcugaggaauuucacucc

SEQ ID NO: 7924 - RNA, 22 nt, Artificial Sequence
  Synthetic
ggaauuucacuccggugaccca

SEQ ID NO: 7925 - RNA, 22 nt, Artificial Sequence
  Synthetic
gggucaccggagugaaauuccu

SEQ ID NO: 7926 - RNA, 22 nt, Artificial Sequence
  Synthetic
gggugcugggucaccggaguga

SEQ ID NO: 7927 - RNA, 22 nt, Artificial Sequence
  Synthetic
ggucaccggagugaaauuccuc

SEQ ID NO: 7928 - RNA, 22 nt, Artificial Sequence
  Synthetic
ggugcugggucaccggagugaa

SEQ ID NO: 7929 - RNA, 22 nt, Artificial Sequence
  Synthetic
gucaccggagugaaauuccuca

SEQ ID NO: 7930 - RNA, 22 nt, Artificial Sequence
  Synthetic
gugcugggucaccggagugaaa

SEQ ID NO: 7931 - RNA, 22 nt, Artificial Sequence
  Synthetic
ucaccggagugaaauuccucag

SEQ ID NO: 7932 - RNA, 22 nt, Artificial Sequence
  Synthetic
ucaccuccgggugcugggucac

SEQ ID NO: 7933 - RNA, 22 nt, Artificial Sequence
  Synthetic
ucacuccggugacccagcaccc

SEQ ID NO: 7934 - RNA, 22 nt, Artificial Sequence
  Synthetic
uccgggugcugggucaccggag

SEQ ID NO: 7935 - RNA, 22 nt, Artificial Sequence
  Synthetic
uccggugacccagcacccggag

SEQ ID NO: 7936 - RNA, 22 nt, Artificial Sequence
  Synthetic
ugaggaauuucacuccggugac

SEQ ID NO: 7937 - RNA, 22 nt, Artificial Sequence
  Synthetic
ugcugaggaauuucacuccggu

SEQ ID NO: 7938 - RNA, 22 nt, Artificial Sequence
  Synthetic
ugcugggucaccggagugaaau

SEQ ID NO: 7939 - RNA, 22 nt, Artificial Sequence
  Synthetic
ugggucaccggagugaaauucc

SEQ ID NO: 7940 - RNA, 22 nt, Artificial Sequence
  Synthetic
uucacuccggugacccagcacc

SEQ ID NO: 7941 - RNA, 22 nt, Artificial Sequence
  Synthetic
uugcugaggaauuucacuccgg

SEQ ID NO: 7942 - RNA, 22 nt, Artificial Sequence
  Synthetic
uuucacuccggugacccagcac

SEQ ID NO: 7943 - RNA, 20 nt, Artificial Sequence
  Synthetic
aacgucacugaguuugauga

SEQ ID NO: 7944 - RNA, 20 nt, Artificial Sequence
  Synthetic
aacuacuacucaucugucau

SEQ ID NO: 7945 - RNA, 20 nt, Artificial Sequence
  Synthetic
acagaugaguaguaguucag

SEQ ID NO: 7946 - RNA, 20 nt, Artificial Sequence
  Synthetic
acgucacugaguuugaugac

SEQ ID NO: 7947 - RNA, 20 nt, Artificial Sequence
  Synthetic
acuacuacucaucugucauc

SEQ ID NO: 7948 - RNA, 20 nt, Artificial Sequence
  Synthetic
acuacucaucugucaucaaa

SEQ ID NO: 7949 - RNA, 20 nt, Artificial Sequence
  Synthetic
acucaucugucaucaaacuc

SEQ ID NO: 7950 - RNA, 20 nt, Artificial Sequence
  Synthetic
acugaguuugaugacagaug

SEQ ID NO: 7951 - RNA, 20 nt, Artificial Sequence
  Synthetic
agaugaguaguaguucagaa

SEQ ID NO: 7952 - RNA, 20 nt, Artificial Sequence
  Synthetic
aguuugaugacagaugagua

SEQ ID NO: 7953 - RNA, 20 nt, Artificial Sequence
  Synthetic
aucugucaucaaacucagug

SEQ ID NO: 7954 - RNA, 20 nt, Artificial Sequence
  Synthetic
augacagaugaguaguaguu

SEQ ID NO: 7955 - RNA, 20 nt, Artificial Sequence
  Synthetic
cacugaguuugaugacagau

SEQ ID NO: 7956 - RNA, 20 nt, Artificial Sequence
  Synthetic
cagaugaguaguaguucaga

SEQ ID NO: 7957 - RNA, 20 nt, Artificial Sequence
  Synthetic
caucugucaucaaacucagu

SEQ ID NO: 7958 - RNA, 20 nt, Artificial Sequence
  Synthetic
cgucacugaguuugaugaca

SEQ ID NO: 7959 - RNA, 20 nt, Artificial Sequence
  Synthetic
cuacuacucaucugucauca

SEQ ID NO: 7960 - RNA, 20 nt, Artificial Sequence
  Synthetic
cuacucaucugucaucaaac

SEQ ID NO: 7961 - RNA, 20 nt, Artificial Sequence
  Synthetic
cucaucugucaucaaacuca

SEQ ID NO: 7962 - RNA, 20 nt, Artificial Sequence
  Synthetic
cugaacuacuacucaucugu

SEQ ID NO: 7963 - RNA, 20 nt, Artificial Sequence
  Synthetic
cugaguuugaugacagauga

SEQ ID NO: 7964 - RNA, 20 nt, Artificial Sequence
  Synthetic
cuuucugaacuacuacucau

SEQ ID NO: 7965 - RNA, 20 nt, Artificial Sequence
  Synthetic
gaacuacuacucaucuguca

SEQ ID NO: 7966 - RNA, 20 nt, Artificial Sequence
  Synthetic
gacagaugaguaguaguuca

SEQ ID NO: 7967 - RNA, 20 nt, Artificial Sequence
  Synthetic
gaguuugaugacagaugagu

SEQ ID NO: 7968 - RNA, 20 nt, Artificial Sequence
  Synthetic
gaugacagaugaguaguagu

SEQ ID NO: 7969 - RNA, 20 nt, Artificial Sequence
  Synthetic
gaugaguaguaguucagaaa

SEQ ID NO: 7970 - RNA, 20 nt, Artificial Sequence
  Synthetic
gcuuucugaacuacuacuca

SEQ ID NO: 7971 - RNA, 20 nt, Artificial Sequence
  Synthetic
gucacugaguuugaugacag

SEQ ID NO: 7972 - RNA, 20 nt, Artificial Sequence
  Synthetic
gugcuuucugaacuacuacu

SEQ ID NO: 7973 - RNA, 20 nt, Artificial Sequence
  Synthetic
guuugaugacagaugaguag

SEQ ID NO: 7974 - RNA, 20 nt, Artificial Sequence
  Synthetic
uacuacucaucugucaucaa

SEQ ID NO: 7975 - RNA, 20 nt, Artificial Sequence
  Synthetic
uacucaucugucaucaaacu

SEQ ID NO: 7976 - RNA, 20 nt, Artificial Sequence
  Synthetic
ucacugaguuugaugacaga

SEQ ID NO: 7977 - RNA, 20 nt, Artificial Sequence
  Synthetic
ucaucugucaucaaacucag

SEQ ID NO: 7978 - RNA, 20 nt, Artificial Sequence
  Synthetic
ucugaacuacuacucaucug

SEQ ID NO: 7979 - RNA, 20 nt, Artificial Sequence
  Synthetic
ugaacuacuacucaucuguc

SEQ ID NO: 7980 - RNA, 20 nt, Artificial Sequence
  Synthetic
ugacagaugaguaguaguuc

SEQ ID NO: 7981 - RNA, 20 nt, Artificial Sequence
  Synthetic
ugaguuugaugacagaugag

SEQ ID NO: 7982 - RNA, 20 nt, Artificial Sequence
  Synthetic
ugaugacagaugaguaguag

SEQ ID NO: 7983 - RNA, 20 nt, Artificial Sequence
  Synthetic
ugcuuucugaacuacuacuc

SEQ ID NO: 7984 - RNA, 20 nt, Artificial Sequence
  Synthetic
ugugcuuucugaacuacuac

SEQ ID NO: 7985 - RNA, 20 nt, Artificial Sequence
  Synthetic
uucugaacuacuacucaucu

SEQ ID NO: 7986 - RNA, 20 nt, Artificial Sequence
  Synthetic
uugaugacagaugaguagua

SEQ ID NO: 7987 - RNA, 20 nt, Artificial Sequence
  Synthetic
uuucugaacuacuacucauc

SEQ ID NO: 7988 - RNA, 20 nt, Artificial Sequence
  Synthetic
uuugaugacagaugaguagu

SEQ ID NO: 7989 - RNA, 21 nt, Artificial Sequence
  Synthetic
aacgucacugaguuugaugac

SEQ ID NO: 7990 - RNA, 21 nt, Artificial Sequence
  Synthetic
aacuacuacucaucugucauc

SEQ ID NO: 7991 - RNA, 21 nt, Artificial Sequence
  Synthetic
acagaugaguaguaguucaga

SEQ ID NO: 7992 - RNA, 21 nt, Artificial Sequence
  Synthetic
acgucacugaguuugaugaca

SEQ ID NO: 7993 - RNA, 21 nt, Artificial Sequence
  Synthetic
acuacuacucaucugucauca

SEQ ID NO: 7994 - RNA, 21 nt, Artificial Sequence
  Synthetic
acuacucaucugucaucaaac

SEQ ID NO: 7995 - RNA, 21 nt, Artificial Sequence
  Synthetic
acucaucugucaucaaacuca

SEQ ID NO: 7996 - RNA, 21 nt, Artificial Sequence
  Synthetic
acugaguuugaugacagauga

SEQ ID NO: 7997 - RNA, 21 nt, Artificial Sequence
  Synthetic
agaugaguaguaguucagaaa

SEQ ID NO: 7998 - RNA, 21 nt, Artificial Sequence
  Synthetic
aguuugaugacagaugaguag

SEQ ID NO: 7999 - RNA, 21 nt, Artificial Sequence
  Synthetic
aucugucaucaaacucaguga

SEQ ID NO: 8000 - RNA, 21 nt, Artificial Sequence
  Synthetic
augacagaugaguaguaguuc

SEQ ID NO: 8001 - RNA, 21 nt, Artificial Sequence
  Synthetic
augugcuuucugaacuacuac

SEQ ID NO: 8002 - RNA, 21 nt, Artificial Sequence
  Synthetic
cacugaguuugaugacagaug

SEQ ID NO: 8003 - RNA, 21 nt, Artificial Sequence
  Synthetic
cagaugaguaguaguucagaa

SEQ ID NO: 8004 - RNA, 21 nt, Artificial Sequence
  Synthetic
caucugucaucaaacucagug

SEQ ID NO: 8005 - RNA, 21 nt, Artificial Sequence
  Synthetic
cgucacugaguuugaugacag

SEQ ID NO: 8006 - RNA, 21 nt, Artificial Sequence
  Synthetic
cuacuacucaucugucaucaa

SEQ ID NO: 8007 - RNA, 21 nt, Artificial Sequence
  Synthetic
cuacucaucugucaucaaacu

SEQ ID NO: 8008 - RNA, 21 nt, Artificial Sequence
  Synthetic
cucaucugucaucaaacucag

SEQ ID NO: 8009 - RNA, 21 nt, Artificial Sequence
  Synthetic
cugaacuacuacucaucuguc

SEQ ID NO: 8010 - RNA, 21 nt, Artificial Sequence
  Synthetic
cugaguuugaugacagaugag

SEQ ID NO: 8011 - RNA, 21 nt, Artificial Sequence
  Synthetic
cuuucugaacuacuacucauc

SEQ ID NO: 8012 - RNA, 21 nt, Artificial Sequence
  Synthetic
gaacgucacugaguuugauga

SEQ ID NO: 8013 - RNA, 21 nt, Artificial Sequence
  Synthetic
gaacuacuacucaucugucau

SEQ ID NO: 8014 - RNA, 21 nt, Artificial Sequence
  Synthetic
gacagaugaguaguaguucag

SEQ ID NO: 8015 - RNA, 21 nt, Artificial Sequence
  Synthetic
gaguuugaugacagaugagua

SEQ ID NO: 8016 - RNA, 21 nt, Artificial Sequence
  Synthetic
gaugacagaugaguaguaguu

SEQ ID NO: 8017 - RNA, 21 nt, Artificial Sequence
  Synthetic
gaugaguaguaguucagaaag

SEQ ID NO: 8018 - RNA, 21 nt, Artificial Sequence
  Synthetic
gcuuucugaacuacuacucau

SEQ ID NO: 8019 - RNA, 21 nt, Artificial Sequence
  Synthetic
gucacugaguuugaugacaga

SEQ ID NO: 8020 - RNA, 21 nt, Artificial Sequence
  Synthetic
gugcuuucugaacuacuacuc

SEQ ID NO: 8021 - RNA, 21 nt, Artificial Sequence
  Synthetic
guuugaugacagaugaguagu

SEQ ID NO: 8022 - RNA, 21 nt, Artificial Sequence
  Synthetic
uacuacucaucugucaucaaa

SEQ ID NO: 8023 - RNA, 21 nt, Artificial Sequence
  Synthetic
uacucaucugucaucaaacuc

SEQ ID NO: 8024 - RNA, 21 nt, Artificial Sequence
  Synthetic
ucacugaguuugaugacagau

SEQ ID NO: 8025 - RNA, 21 nt, Artificial Sequence
  Synthetic
ucaucugucaucaaacucagu

SEQ ID NO: 8026 - RNA, 21 nt, Artificial Sequence
  Synthetic
ucugaacuacuacucaucugu

SEQ ID NO: 8027 - RNA, 21 nt, Artificial Sequence
  Synthetic
ugaacuacuacucaucuguca

SEQ ID NO: 8028 - RNA, 21 nt, Artificial Sequence
  Synthetic
ugacagaugaguaguaguuca

SEQ ID NO: 8029 - RNA, 21 nt, Artificial Sequence
  Synthetic
ugaguuugaugacagaugagu

SEQ ID NO: 8030 - RNA, 21 nt, Artificial Sequence
  Synthetic
ugaugacagaugaguaguagu

SEQ ID NO: 8031 - RNA, 21 nt, Artificial Sequence
  Synthetic
ugcuuucugaacuacuacuca

SEQ ID NO: 8032 - RNA, 21 nt, Artificial Sequence
  Synthetic
ugugcuuucugaacuacuacu

SEQ ID NO: 8033 - RNA, 21 nt, Artificial Sequence
  Synthetic
uucugaacuacuacucaucug

SEQ ID NO: 8034 - RNA, 21 nt, Artificial Sequence
  Synthetic
uugaugacagaugaguaguag

SEQ ID NO: 8035 - RNA, 21 nt, Artificial Sequence
  Synthetic
uuucugaacuacuacucaucu

SEQ ID NO: 8036 - RNA, 21 nt, Artificial Sequence
  Synthetic
uuugaugacagaugaguagua

SEQ ID NO: 8037 - RNA, 22 nt, Artificial Sequence
  Synthetic
aacgucacugaguuugaugaca

SEQ ID NO: 8038 - RNA, 22 nt, Artificial Sequence
  Synthetic
aacuacuacucaucugucauca

SEQ ID NO: 8039 - RNA, 22 nt, Artificial Sequence
  Synthetic
acagaugaguaguaguucagaa

SEQ ID NO: 8040 - RNA, 22 nt, Artificial Sequence
  Synthetic
acgucacugaguuugaugacag

SEQ ID NO: 8041 - RNA, 22 nt, Artificial Sequence
  Synthetic
acuacuacucaucugucaucaa

SEQ ID NO: 8042 - RNA, 22 nt, Artificial Sequence
  Synthetic
acuacucaucugucaucaaacu

SEQ ID NO: 8043 - RNA, 22 nt, Artificial Sequence
  Synthetic
acucaucugucaucaaacucag

SEQ ID NO: 8044 - RNA, 22 nt, Artificial Sequence
  Synthetic
acugaguuugaugacagaugag

SEQ ID NO: 8045 - RNA, 22 nt, Artificial Sequence
  Synthetic
agaacgucacugaguuugauga

SEQ ID NO: 8046 - RNA, 22 nt, Artificial Sequence
  Synthetic
agaugaguaguaguucagaaag

SEQ ID NO: 8047 - RNA, 22 nt, Artificial Sequence
  Synthetic
aguuugaugacagaugaguagu

SEQ ID NO: 8048 - RNA, 22 nt, Artificial Sequence
  Synthetic
aucugucaucaaacucagugac

SEQ ID NO: 8049 - RNA, 22 nt, Artificial Sequence
  Synthetic
augacagaugaguaguaguuca

SEQ ID NO: 8050 - RNA, 22 nt, Artificial Sequence
  Synthetic
augugcuuucugaacuacuacu

SEQ ID NO: 8051 - RNA, 22 nt, Artificial Sequence
  Synthetic
cacugaguuugaugacagauga

SEQ ID NO: 8052 - RNA, 22 nt, Artificial Sequence
  Synthetic
cagaugaguaguaguucagaaa

SEQ ID NO: 8053 - RNA, 22 nt, Artificial Sequence
  Synthetic
caucugucaucaaacucaguga

SEQ ID NO: 8054 - RNA, 22 nt, Artificial Sequence
  Synthetic
caugugcuuucugaacuacuac

SEQ ID NO: 8055 - RNA, 22 nt, Artificial Sequence
  Synthetic
cgucacugaguuugaugacaga

SEQ ID NO: 8056 - RNA, 22 nt, Artificial Sequence
  Synthetic
cuacuacucaucugucaucaaa

SEQ ID NO: 8057 - RNA, 22 nt, Artificial Sequence
  Synthetic
cuacucaucugucaucaaacuc

SEQ ID NO: 8058 - RNA, 22 nt, Artificial Sequence
  Synthetic
cucaucugucaucaaacucagu

SEQ ID NO: 8059 - RNA, 22 nt, Artificial Sequence
  Synthetic
cugaacuacuacucaucuguca

SEQ ID NO: 8060 - RNA, 22 nt, Artificial Sequence
  Synthetic
cugaguuugaugacagaugagu

SEQ ID NO: 8061 - RNA, 22 nt, Artificial Sequence
  Synthetic
cuuucugaacuacuacucaucu

SEQ ID NO: 8062 - RNA, 22 nt, Artificial Sequence
  Synthetic
gaacgucacugaguuugaugac

SEQ ID NO: 8063 - RNA, 22 nt, Artificial Sequence
  Synthetic
gaacuacuacucaucugucauc

SEQ ID NO: 8064 - RNA, 22 nt, Artificial Sequence
  Synthetic
gacagaugaguaguaguucaga

SEQ ID NO: 8065 - RNA, 22 nt, Artificial Sequence
  Synthetic
gaguuugaugacagaugaguag

SEQ ID NO: 8066 - RNA, 22 nt, Artificial Sequence
  Synthetic
gaugacagaugaguaguaguuc

SEQ ID NO: 8067 - RNA, 22 nt, Artificial Sequence
  Synthetic
gaugaguaguaguucagaaagc

SEQ ID NO: 8068 - RNA, 22 nt, Artificial Sequence
  Synthetic
gcuuucugaacuacuacucauc

SEQ ID NO: 8069 - RNA, 22 nt, Artificial Sequence
  Synthetic
gucacugaguuugaugacagau

SEQ ID NO: 8070 - RNA, 22 nt, Artificial Sequence
  Synthetic
gugcuuucugaacuacuacuca

SEQ ID NO: 8071 - RNA, 22 nt, Artificial Sequence
  Synthetic
guuugaugacagaugaguagua

SEQ ID NO: 8072 - RNA, 22 nt, Artificial Sequence
  Synthetic
uacuacucaucugucaucaaac

SEQ ID NO: 8073 - RNA, 22 nt, Artificial Sequence
  Synthetic
uacucaucugucaucaaacuca

SEQ ID NO: 8074 - RNA, 22 nt, Artificial Sequence
  Synthetic
ucacugaguuugaugacagaug

SEQ ID NO: 8075 - RNA, 22 nt, Artificial Sequence
  Synthetic
ucaucugucaucaaacucagug

SEQ ID NO: 8076 - RNA, 22 nt, Artificial Sequence
  Synthetic
ucugaacuacuacucaucuguc

SEQ ID NO: 8077 - RNA, 22 nt, Artificial Sequence
  Synthetic
ugaacuacuacucaucugucau

SEQ ID NO: 8078 - RNA, 22 nt, Artificial Sequence
  Synthetic
ugacagaugaguaguaguucag

SEQ ID NO: 8079 - RNA, 22 nt, Artificial Sequence
  Synthetic
ugaguuugaugacagaugagua

SEQ ID NO: 8080 - RNA, 22 nt, Artificial Sequence
  Synthetic
ugaugacagaugaguaguaguu

SEQ ID NO: 8081 - RNA, 22 nt, Artificial Sequence
  Synthetic
ugcuuucugaacuacuacucau

SEQ ID NO: 8082 - RNA, 22 nt, Artificial Sequence
  Synthetic
ugugcuuucugaacuacuacuc

SEQ ID NO: 8083 - RNA, 22 nt, Artificial Sequence
  Synthetic
uucugaacuacuacucaucugu

SEQ ID NO: 8084 - RNA, 22 nt, Artificial Sequence
  Synthetic
uugaugacagaugaguaguagu

SEQ ID NO: 8085 - RNA, 22 nt, Artificial Sequence
  Synthetic
uuucugaacuacuacucaucug

SEQ ID NO: 8086 - RNA, 22 nt, Artificial Sequence
  Synthetic
uuugaugacagaugaguaguag

SEQ ID NO: 8087 - RNA, 20 nt, Artificial Sequence
  Synthetic
aacgucacugagucugauga

SEQ ID NO: 8088 - RNA, 20 nt, Artificial Sequence
  Synthetic
aacuacuacucaccugucau

SEQ ID NO: 8089 - RNA, 20 nt, Artificial Sequence
  Synthetic
accugucaucagacucagug

SEQ ID NO: 8090 - RNA, 20 nt, Artificial Sequence
  Synthetic
acgucacugagucugaugac

SEQ ID NO: 8091 - RNA, 20 nt, Artificial Sequence
  Synthetic
acuacuacucaccugucauc

SEQ ID NO: 8092 - RNA, 20 nt, Artificial Sequence
  Synthetic
acuacucaccugucaucaga

SEQ ID NO: 8093 - RNA, 20 nt, Artificial Sequence
  Synthetic
acucaccugucaucagacuc

SEQ ID NO: 8094 - RNA, 20 nt, Artificial Sequence
  Synthetic
acugagucugaugacaggug

SEQ ID NO: 8095 - RNA, 20 nt, Artificial Sequence
  Synthetic
agaacgucacugagucugau

SEQ ID NO: 8096 - RNA, 20 nt, Artificial Sequence
  Synthetic
agacucagugacguucugca

SEQ ID NO: 8097 - RNA, 20 nt, Artificial Sequence
  Synthetic
agucugaugacaggugagua

SEQ ID NO: 8098 - RNA, 20 nt, Artificial Sequence
  Synthetic
aucagacucagugacguucu

SEQ ID NO: 8099 - RNA, 20 nt, Artificial Sequence
  Synthetic
caccugucaucagacucagu

SEQ ID NO: 8100 - RNA, 20 nt, Artificial Sequence
  Synthetic
cacugagucugaugacaggu

SEQ ID NO: 8101 - RNA, 20 nt, Artificial Sequence
  Synthetic
cagaacgucacugagucuga

SEQ ID NO: 8102 - RNA, 20 nt, Artificial Sequence
  Synthetic
cagacucagugacguucugc

SEQ ID NO: 8103 - RNA, 20 nt, Artificial Sequence
  Synthetic
caucagacucagugacguuc

SEQ ID NO: 8104 - RNA, 20 nt, Artificial Sequence
  Synthetic
ccugucaucagacucaguga

SEQ ID NO: 8105 - RNA, 20 nt, Artificial Sequence
  Synthetic
cgggugcagaacgucacuga

SEQ ID NO: 8106 - RNA, 20 nt, Artificial Sequence
  Synthetic
cgucacugagucugaugaca

SEQ ID NO: 8107 - RNA, 20 nt, Artificial Sequence
  Synthetic
cuacuacucaccugucauca

SEQ ID NO: 8108 - RNA, 20 nt, Artificial Sequence
  Synthetic
cuacucaccugucaucagac

SEQ ID NO: 8109 - RNA, 20 nt, Artificial Sequence
  Synthetic
cucaccugucaucagacuca

SEQ ID NO: 8110 - RNA, 20 nt, Artificial Sequence
  Synthetic
cugagucugaugacagguga

SEQ ID NO: 8111 - RNA, 20 nt, Artificial Sequence
  Synthetic
cugucaucagacucagugac

SEQ ID NO: 8112 - RNA, 20 nt, Artificial Sequence
  Synthetic
gaacgucacugagucugaug

SEQ ID NO: 8113 - RNA, 20 nt, Artificial Sequence
  Synthetic
gaacuacuacucaccuguca

SEQ ID NO: 8114 - RNA, 20 nt, Artificial Sequence
  Synthetic
gagucugaugacaggugagu

SEQ ID NO: 8115 - RNA, 20 nt, Artificial Sequence
  Synthetic
gcagaacgucacugagucug

SEQ ID NO: 8116 - RNA, 20 nt, Artificial Sequence
  Synthetic
gcgggugcagaacgucacug

SEQ ID NO: 8117 - RNA, 20 nt, Artificial Sequence
  Synthetic
gggugcagaacgucacugag

SEQ ID NO: 8118 - RNA, 20 nt, Artificial Sequence
  Synthetic
ggugcagaacgucacugagu

SEQ ID NO: 8119 - RNA, 20 nt, Artificial Sequence
  Synthetic
gucacugagucugaugacag

SEQ ID NO: 8120 - RNA, 20 nt, Artificial Sequence
  Synthetic
gucaucagacucagugacgu

SEQ ID NO: 8121 - RNA, 20 nt, Artificial Sequence
  Synthetic
gucugaugacaggugaguag

SEQ ID NO: 8122 - RNA, 20 nt, Artificial Sequence
  Synthetic
gugcagaacgucacugaguc

SEQ ID NO: 8123 - RNA, 20 nt, Artificial Sequence
  Synthetic
uacuacucaccugucaucag

SEQ ID NO: 8124 - RNA, 20 nt, Artificial Sequence
  Synthetic
uacucaccugucaucagacu

SEQ ID NO: 8125 - RNA, 20 nt, Artificial Sequence
  Synthetic
ucaccugucaucagacucag

SEQ ID NO: 8126 - RNA, 20 nt, Artificial Sequence
  Synthetic
ucacugagucugaugacagg

SEQ ID NO: 8127 - RNA, 20 nt, Artificial Sequence
  Synthetic
ucagacucagugacguucug

SEQ ID NO: 8128 - RNA, 20 nt, Artificial Sequence
  Synthetic
ucaucagacucagugacguu

SEQ ID NO: 8129 - RNA, 20 nt, Artificial Sequence
  Synthetic
ucugaugacaggugaguagu

SEQ ID NO: 8130 - RNA, 20 nt, Artificial Sequence
  Synthetic
ugagucugaugacaggugag

SEQ ID NO: 8131 - RNA, 20 nt, Artificial Sequence
  Synthetic
ugcagaacgucacugagucu

SEQ ID NO: 8132 - RNA, 20 nt, Artificial Sequence
  Synthetic
ugucaucagacucagugacg

SEQ ID NO: 8133 - RNA, 21 nt, Artificial Sequence
  Synthetic
aacgucacugagucugaugac

SEQ ID NO: 8134 - RNA, 21 nt, Artificial Sequence
  Synthetic
aacuacuacucaccugucauc

SEQ ID NO: 8135 - RNA, 21 nt, Artificial Sequence
  Synthetic
accugucaucagacucaguga

SEQ ID NO: 8136 - RNA, 21 nt, Artificial Sequence
  Synthetic
acgucacugagucugaugaca

SEQ ID NO: 8137 - RNA, 21 nt, Artificial Sequence
  Synthetic
acuacuacucaccugucauca

SEQ ID NO: 8138 - RNA, 21 nt, Artificial Sequence
  Synthetic
acuacucaccugucaucagac

SEQ ID NO: 8139 - RNA, 21 nt, Artificial Sequence
  Synthetic
acucaccugucaucagacuca

SEQ ID NO: 8140 - RNA, 21 nt, Artificial Sequence
  Synthetic
acugagucugaugacagguga

SEQ ID NO: 8141 - RNA, 21 nt, Artificial Sequence
  Synthetic
agaacgucacugagucugaug

SEQ ID NO: 8142 - RNA, 21 nt, Artificial Sequence
  Synthetic
agacucagugacguucugcac

SEQ ID NO: 8143 - RNA, 21 nt, Artificial Sequence
  Synthetic
agcgggugcagaacgucacug

SEQ ID NO: 8144 - RNA, 21 nt, Artificial Sequence
  Synthetic
agucugaugacaggugaguag

SEQ ID NO: 8145 - RNA, 21 nt, Artificial Sequence
  Synthetic
aucagacucagugacguucug

SEQ ID NO: 8146 - RNA, 21 nt, Artificial Sequence
  Synthetic
caccugucaucagacucagug

SEQ ID NO: 8147 - RNA, 21 nt, Artificial Sequence
  Synthetic
cacugagucugaugacaggug

SEQ ID NO: 8148 - RNA, 21 nt, Artificial Sequence
  Synthetic
cagaacgucacugagucugau

SEQ ID NO: 8149 - RNA, 21 nt, Artificial Sequence
  Synthetic
cagacucagugacguucugca

SEQ ID NO: 8150 - RNA, 21 nt, Artificial Sequence
  Synthetic
caucagacucagugacguucu

SEQ ID NO: 8151 - RNA, 21 nt, Artificial Sequence
  Synthetic
ccugucaucagacucagugac

SEQ ID NO: 8152 - RNA, 21 nt, Artificial Sequence
  Synthetic
cgggugcagaacgucacugag

SEQ ID NO: 8153 - RNA, 21 nt, Artificial Sequence
  Synthetic
cgucacugagucugaugacag

SEQ ID NO: 8154 - RNA, 21 nt, Artificial Sequence
  Synthetic
cuacuacucaccugucaucag

SEQ ID NO: 8155 - RNA, 21 nt, Artificial Sequence
  Synthetic
cuacucaccugucaucagacu

SEQ ID NO: 8156 - RNA, 21 nt, Artificial Sequence
  Synthetic
cucaccugucaucagacucag

SEQ ID NO: 8157 - RNA, 21 nt, Artificial Sequence
  Synthetic
cugagucugaugacaggugag

SEQ ID NO: 8158 - RNA, 21 nt, Artificial Sequence
  Synthetic
cugucaucagacucagugacg

SEQ ID NO: 8159 - RNA, 21 nt, Artificial Sequence
  Synthetic
gaacgucacugagucugauga

SEQ ID NO: 8160 - RNA, 21 nt, Artificial Sequence
  Synthetic
gaacuacuacucaccugucau

SEQ ID NO: 8161 - RNA, 21 nt, Artificial Sequence
  Synthetic
gagucugaugacaggugagua

SEQ ID NO: 8162 - RNA, 21 nt, Artificial Sequence
  Synthetic
gcagaacgucacugagucuga

SEQ ID NO: 8163 - RNA, 21 nt, Artificial Sequence
  Synthetic
gcgggugcagaacgucacuga

SEQ ID NO: 8164 - RNA, 21 nt, Artificial Sequence
  Synthetic
gggugcagaacgucacugagu

SEQ ID NO: 8165 - RNA, 21 nt, Artificial Sequence
  Synthetic
ggugcagaacgucacugaguc

SEQ ID NO: 8166 - RNA, 21 nt, Artificial Sequence
  Synthetic
gucacugagucugaugacagg

SEQ ID NO: 8167 - RNA, 21 nt, Artificial Sequence
  Synthetic
gucaucagacucagugacguu

SEQ ID NO: 8168 - RNA, 21 nt, Artificial Sequence
  Synthetic
gucugaugacaggugaguagu

SEQ ID NO: 8169 - RNA, 21 nt, Artificial Sequence
  Synthetic
gugcagaacgucacugagucu

SEQ ID NO: 8170 - RNA, 21 nt, Artificial Sequence
  Synthetic
uacuacucaccugucaucaga

SEQ ID NO: 8171 - RNA, 21 nt, Artificial Sequence
  Synthetic
uacucaccugucaucagacuc

SEQ ID NO: 8172 - RNA, 21 nt, Artificial Sequence
  Synthetic
ucaccugucaucagacucagu

SEQ ID NO: 8173 - RNA, 21 nt, Artificial Sequence
  Synthetic
ucacugagucugaugacaggu

SEQ ID NO: 8174 - RNA, 21 nt, Artificial Sequence
  Synthetic
ucagacucagugacguucugc

SEQ ID NO: 8175 - RNA, 21 nt, Artificial Sequence
  Synthetic
ucaucagacucagugacguuc

SEQ ID NO: 8176 - RNA, 21 nt, Artificial Sequence
  Synthetic
ucugaugacaggugaguagua

SEQ ID NO: 8177 - RNA, 21 nt, Artificial Sequence
  Synthetic
ugaacuacuacucaccuguca

SEQ ID NO: 8178 - RNA, 21 nt, Artificial Sequence
  Synthetic
ugagucugaugacaggugagu

SEQ ID NO: 8179 - RNA, 21 nt, Artificial Sequence
  Synthetic
ugcagaacgucacugagucug

SEQ ID NO: 8180 - RNA, 21 nt, Artificial Sequence
  Synthetic
ugucaucagacucagugacgu

SEQ ID NO: 8181 - RNA, 22 nt, Artificial Sequence
  Synthetic
aacgucacugagucugaugaca

SEQ ID NO: 8182 - RNA, 22 nt, Artificial Sequence
  Synthetic
aacuacuacucaccugucauca

SEQ ID NO: 8183 - RNA, 22 nt, Artificial Sequence
  Synthetic
aagcgggugcagaacgucacug

SEQ ID NO: 8184 - RNA, 22 nt, Artificial Sequence
  Synthetic
accugucaucagacucagugac

SEQ ID NO: 8185 - RNA, 22 nt, Artificial Sequence
  Synthetic
acgucacugagucugaugacag

SEQ ID NO: 8186 - RNA, 22 nt, Artificial Sequence
  Synthetic
acuacuacucaccugucaucag

SEQ ID NO: 8187 - RNA, 22 nt, Artificial Sequence
  Synthetic
acuacucaccugucaucagacu

SEQ ID NO: 8188 - RNA, 22 nt, Artificial Sequence
  Synthetic
acucaccugucaucagacucag

SEQ ID NO: 8189 - RNA, 22 nt, Artificial Sequence
  Synthetic
acugagucugaugacaggugag

SEQ ID NO: 8190 - RNA, 22 nt, Artificial Sequence
  Synthetic
agaacgucacugagucugauga

SEQ ID NO: 8191 - RNA, 22 nt, Artificial Sequence
  Synthetic
agacucagugacguucugcacc

SEQ ID NO: 8192 - RNA, 22 nt, Artificial Sequence
  Synthetic
agcgggugcagaacgucacuga

SEQ ID NO: 8193 - RNA, 22 nt, Artificial Sequence
  Synthetic
agucugaugacaggugaguagu

SEQ ID NO: 8194 - RNA, 22 nt, Artificial Sequence
  Synthetic
aucagacucagugacguucugc

SEQ ID NO: 8195 - RNA, 22 nt, Artificial Sequence
  Synthetic
caccugucaucagacucaguga

SEQ ID NO: 8196 - RNA, 22 nt, Artificial Sequence
  Synthetic
cacugagucugaugacagguga

SEQ ID NO: 8197 - RNA, 22 nt, Artificial Sequence
  Synthetic
cagaacgucacugagucugaug

SEQ ID NO: 8198 - RNA, 22 nt, Artificial Sequence
  Synthetic
cagacucagugacguucugcac

SEQ ID NO: 8199 - RNA, 22 nt, Artificial Sequence
  Synthetic
caucagacucagugacguucug

SEQ ID NO: 8200 - RNA, 22 nt, Artificial Sequence
  Synthetic
ccugucaucagacucagugacg

SEQ ID NO: 8201 - RNA, 22 nt, Artificial Sequence
  Synthetic
cgggugcagaacgucacugagu

SEQ ID NO: 8202 - RNA, 22 nt, Artificial Sequence
  Synthetic
cgucacugagucugaugacagg

SEQ ID NO: 8203 - RNA, 22 nt, Artificial Sequence
  Synthetic
cuacuacucaccugucaucaga

SEQ ID NO: 8204 - RNA, 22 nt, Artificial Sequence
  Synthetic
cuacucaccugucaucagacuc

SEQ ID NO: 8205 - RNA, 22 nt, Artificial Sequence
  Synthetic
cucaccugucaucagacucagu

SEQ ID NO: 8206 - RNA, 22 nt, Artificial Sequence
  Synthetic
cugaacuacuacucaccuguca

SEQ ID NO: 8207 - RNA, 22 nt, Artificial Sequence
  Synthetic
cugagucugaugacaggugagu

SEQ ID NO: 8208 - RNA, 22 nt, Artificial Sequence
  Synthetic
cugucaucagacucagugacgu

SEQ ID NO: 8209 - RNA, 22 nt, Artificial Sequence
  Synthetic
gaacgucacugagucugaugac

SEQ ID NO: 8210 - RNA, 22 nt, Artificial Sequence
  Synthetic
gaacuacuacucaccugucauc

SEQ ID NO: 8211 - RNA, 22 nt, Artificial Sequence
  Synthetic
gagucugaugacaggugaguag

SEQ ID NO: 8212 - RNA, 22 nt, Artificial Sequence
  Synthetic
gcagaacgucacugagucugau

SEQ ID NO: 8213 - RNA, 22 nt, Artificial Sequence
  Synthetic
gcgggugcagaacgucacugag

SEQ ID NO: 8214 - RNA, 22 nt, Artificial Sequence
  Synthetic
gggugcagaacgucacugaguc

SEQ ID NO: 8215 - RNA, 22 nt, Artificial Sequence
  Synthetic
ggugcagaacgucacugagucu

SEQ ID NO: 8216 - RNA, 22 nt, Artificial Sequence
  Synthetic
gucacugagucugaugacaggu

SEQ ID NO: 8217 - RNA, 22 nt, Artificial Sequence
  Synthetic
gucaucagacucagugacguuc

SEQ ID NO: 8218 - RNA, 22 nt, Artificial Sequence
  Synthetic
gucugaugacaggugaguagua

SEQ ID NO: 8219 - RNA, 22 nt, Artificial Sequence
  Synthetic
gugcagaacgucacugagucug

SEQ ID NO: 8220 - RNA, 22 nt, Artificial Sequence
  Synthetic
uacuacucaccugucaucagac

SEQ ID NO: 8221 - RNA, 22 nt, Artificial Sequence
  Synthetic
uacucaccugucaucagacuca

SEQ ID NO: 8222 - RNA, 22 nt, Artificial Sequence
  Synthetic
ucaccugucaucagacucagug

SEQ ID NO: 8223 - RNA, 22 nt, Artificial Sequence
  Synthetic
ucacugagucugaugacaggug

SEQ ID NO: 8224 - RNA, 22 nt, Artificial Sequence
  Synthetic
ucagacucagugacguucugca

SEQ ID NO: 8225 - RNA, 22 nt, Artificial Sequence
  Synthetic
ucaucagacucagugacguucu

SEQ ID NO: 8226 - RNA, 22 nt, Artificial Sequence
  Synthetic
ucugaugacaggugaguaguag

SEQ ID NO: 8227 - RNA, 22 nt, Artificial Sequence
  Synthetic
ugaacuacuacucaccugucau

SEQ ID NO: 8228 - RNA, 22 nt, Artificial Sequence
  Synthetic
ugagucugaugacaggugagua

SEQ ID NO: 8229 - RNA, 22 nt, Artificial Sequence
  Synthetic
ugcagaacgucacugagucuga

SEQ ID NO: 8230 - RNA, 22 nt, Artificial Sequence
  Synthetic
ugucaucagacucagugacguu

SEQ ID NO: 8231 - RNA, 20 nt, Artificial Sequence
  Synthetic
acccgcuucugauaauccuc

SEQ ID NO: 8232 - RNA, 20 nt, Artificial Sequence
  Synthetic
acguucugcacccgcuucug

SEQ ID NO: 8233 - RNA, 20 nt, Artificial Sequence
  Synthetic
aggauuaucagaagcgggug

SEQ ID NO: 8234 - RNA, 20 nt, Artificial Sequence
  Synthetic
agugacguucugcacccgcu

SEQ ID NO: 8235 - RNA, 20 nt, Artificial Sequence
  Synthetic
aucagaagcgggugcagaac

SEQ ID NO: 8236 - RNA, 20 nt, Artificial Sequence
  Synthetic
auuaucagaagcgggugcag

SEQ ID NO: 8237 - RNA, 20 nt, Artificial Sequence
  Synthetic
auucugcuggaggauuauca

SEQ ID NO: 8238 - RNA, 20 nt, Artificial Sequence
  Synthetic
cacccgcuucugauaauccu

SEQ ID NO: 8239 - RNA, 20 nt, Artificial Sequence
  Synthetic
cagaagcgggugcagaacgu

SEQ ID NO: 8240 - RNA, 20 nt, Artificial Sequence
  Synthetic
cagugacguucugcacccgc

SEQ ID NO: 8241 - RNA, 20 nt, Artificial Sequence
  Synthetic
cccgcuucugauaauccucc

SEQ ID NO: 8242 - RNA, 20 nt, Artificial Sequence
  Synthetic
ccgcuucugauaauccucca

SEQ ID NO: 8243 - RNA, 20 nt, Artificial Sequence
  Synthetic
cgcuucugauaauccuccag

SEQ ID NO: 8244 - RNA, 20 nt, Artificial Sequence
  Synthetic
cguucugcacccgcuucuga

SEQ ID NO: 8245 - RNA, 20 nt, Artificial Sequence
  Synthetic
cugauaauccuccagcagaa

SEQ ID NO: 8246 - RNA, 20 nt, Artificial Sequence
  Synthetic
cugcacccgcuucugauaau

SEQ ID NO: 8247 - RNA, 20 nt, Artificial Sequence
  Synthetic
cugcuggaggauuaucagaa

SEQ ID NO: 8248 - RNA, 20 nt, Artificial Sequence
  Synthetic
cuggaggauuaucagaagcg

SEQ ID NO: 8249 - RNA, 20 nt, Artificial Sequence
  Synthetic
cuucugauaauccuccagca

SEQ ID NO: 8250 - RNA, 20 nt, Artificial Sequence
  Synthetic
gacguucugcacccgcuucu

SEQ ID NO: 8251 - RNA, 20 nt, Artificial Sequence
  Synthetic
gaggauuaucagaagcgggu

SEQ ID NO: 8252 - RNA, 20 nt, Artificial Sequence
  Synthetic
gauuaucagaagcgggugca

SEQ ID NO: 8253 - RNA, 20 nt, Artificial Sequence
  Synthetic
gauucugcuggaggauuauc

SEQ ID NO: 8254 - RNA, 20 nt, Artificial Sequence
  Synthetic
gcacccgcuucugauaaucc

SEQ ID NO: 8255 - RNA, 20 nt, Artificial Sequence
  Synthetic
gcuggaggauuaucagaagc

SEQ ID NO: 8256 - RNA, 20 nt, Artificial Sequence
  Synthetic
gcuucugauaauccuccagc

SEQ ID NO: 8257 - RNA, 20 nt, Artificial Sequence
  Synthetic
ggaggauuaucagaagcggg

SEQ ID NO: 8258 - RNA, 20 nt, Artificial Sequence
  Synthetic
ggauuaucagaagcgggugc

SEQ ID NO: 8259 - RNA, 20 nt, Artificial Sequence
  Synthetic
ggauucugcuggaggauuau

SEQ ID NO: 8260 - RNA, 20 nt, Artificial Sequence
  Synthetic
gugacguucugcacccgcuu

SEQ ID NO: 8261 - RNA, 20 nt, Artificial Sequence
  Synthetic
guggauucugcuggaggauu

SEQ ID NO: 8262 - RNA, 20 nt, Artificial Sequence
  Synthetic
guucugcacccgcuucugau

SEQ ID NO: 8263 - RNA, 20 nt, Artificial Sequence
  Synthetic
uaucagaagcgggugcagaa

SEQ ID NO: 8264 - RNA, 20 nt, Artificial Sequence
  Synthetic
ucagaagcgggugcagaacg

SEQ ID NO: 8265 - RNA, 20 nt, Artificial Sequence
  Synthetic
ucugauaauccuccagcaga

SEQ ID NO: 8266 - RNA, 20 nt, Artificial Sequence
  Synthetic
ucugcacccgcuucugauaa

SEQ ID NO: 8267 - RNA, 20 nt, Artificial Sequence
  Synthetic
ucugcuggaggauuaucaga

SEQ ID NO: 8268 - RNA, 20 nt, Artificial Sequence
  Synthetic
ugacguucugcacccgcuuc

SEQ ID NO: 8269 - RNA, 20 nt, Artificial Sequence
  Synthetic
ugcacccgcuucugauaauc

SEQ ID NO: 8270 - RNA, 20 nt, Artificial Sequence
  Synthetic
ugcuggaggauuaucagaag

SEQ ID NO: 8271 - RNA, 20 nt, Artificial Sequence
  Synthetic
uggaggauuaucagaagcgg

SEQ ID NO: 8272 - RNA, 20 nt, Artificial Sequence
  Synthetic
uggauucugcuggaggauua

SEQ ID NO: 8273 - RNA, 20 nt, Artificial Sequence
  Synthetic
uuaucagaagcgggugcaga

SEQ ID NO: 8274 - RNA, 20 nt, Artificial Sequence
  Synthetic
uucugauaauccuccagcag

SEQ ID NO: 8275 - RNA, 20 nt, Artificial Sequence
  Synthetic
uucugcacccgcuucugaua

SEQ ID NO: 8276 - RNA, 20 nt, Artificial Sequence
  Synthetic
uucugcuggaggauuaucag

SEQ ID NO: 8277 - RNA, 21 nt, Artificial Sequence
  Synthetic
acccgcuucugauaauccucc

SEQ ID NO: 8278 - RNA, 21 nt, Artificial Sequence
  Synthetic
acguucugcacccgcuucuga

SEQ ID NO: 8279 - RNA, 21 nt, Artificial Sequence
  Synthetic
aggauuaucagaagcgggugc

SEQ ID NO: 8280 - RNA, 21 nt, Artificial Sequence
  Synthetic
agugacguucugcacccgcuu

SEQ ID NO: 8281 - RNA, 21 nt, Artificial Sequence
  Synthetic
aguggauucugcuggaggauu

SEQ ID NO: 8282 - RNA, 21 nt, Artificial Sequence
  Synthetic
aucagaagcgggugcagaacg

SEQ ID NO: 8283 - RNA, 21 nt, Artificial Sequence
  Synthetic
auuaucagaagcgggugcaga

SEQ ID NO: 8284 - RNA, 21 nt, Artificial Sequence
  Synthetic
auucugcuggaggauuaucag

SEQ ID NO: 8285 - RNA, 21 nt, Artificial Sequence
  Synthetic
cacccgcuucugauaauccuc

SEQ ID NO: 8286 - RNA, 21 nt, Artificial Sequence
  Synthetic
cagaagcgggugcagaacguc

SEQ ID NO: 8287 - RNA, 21 nt, Artificial Sequence
  Synthetic
cagugacguucugcacccgcu

SEQ ID NO: 8288 - RNA, 21 nt, Artificial Sequence
  Synthetic
cccgcuucugauaauccucca

SEQ ID NO: 8289 - RNA, 21 nt, Artificial Sequence
  Synthetic
ccgcuucugauaauccuccag

SEQ ID NO: 8290 - RNA, 21 nt, Artificial Sequence
  Synthetic
cgcuucugauaauccuccagc

SEQ ID NO: 8291 - RNA, 21 nt, Artificial Sequence
  Synthetic
cguucugcacccgcuucugau

SEQ ID NO: 8292 - RNA, 21 nt, Artificial Sequence
  Synthetic
cugauaauccuccagcagaau

SEQ ID NO: 8293 - RNA, 21 nt, Artificial Sequence
  Synthetic
cugcacccgcuucugauaauc

SEQ ID NO: 8294 - RNA, 21 nt, Artificial Sequence
  Synthetic
cugcuggaggauuaucagaag

SEQ ID NO: 8295 - RNA, 21 nt, Artificial Sequence
  Synthetic
cuggaggauuaucagaagcgg

SEQ ID NO: 8296 - RNA, 21 nt, Artificial Sequence
  Synthetic
cuucugauaauccuccagcag

SEQ ID NO: 8297 - RNA, 21 nt, Artificial Sequence
  Synthetic
gacguucugcacccgcuucug

SEQ ID NO: 8298 - RNA, 21 nt, Artificial Sequence
  Synthetic
gaggauuaucagaagcgggug

SEQ ID NO: 8299 - RNA, 21 nt, Artificial Sequence
  Synthetic
gauuaucagaagcgggugcag

SEQ ID NO: 8300 - RNA, 21 nt, Artificial Sequence
  Synthetic
gauucugcuggaggauuauca

SEQ ID NO: 8301 - RNA, 21 nt, Artificial Sequence
  Synthetic
gcacccgcuucugauaauccu

SEQ ID NO: 8302 - RNA, 21 nt, Artificial Sequence
  Synthetic
gcuggaggauuaucagaagcg

SEQ ID NO: 8303 - RNA, 21 nt, Artificial Sequence
  Synthetic
gcuucugauaauccuccagca

SEQ ID NO: 8304 - RNA, 21 nt, Artificial Sequence
  Synthetic
ggaggauuaucagaagcgggu

SEQ ID NO: 8305 - RNA, 21 nt, Artificial Sequence
  Synthetic
ggauuaucagaagcgggugca

SEQ ID NO: 8306 - RNA, 21 nt, Artificial Sequence
  Synthetic
ggauucugcuggaggauuauc

SEQ ID NO: 8307 - RNA, 21 nt, Artificial Sequence
  Synthetic
gugacguucugcacccgcuuc

SEQ ID NO: 8308 - RNA, 21 nt, Artificial Sequence
  Synthetic
guggauucugcuggaggauua

SEQ ID NO: 8309 - RNA, 21 nt, Artificial Sequence
  Synthetic
guucugcacccgcuucugaua

SEQ ID NO: 8310 - RNA, 21 nt, Artificial Sequence
  Synthetic
uaucagaagcgggugcagaac

SEQ ID NO: 8311 - RNA, 21 nt, Artificial Sequence
  Synthetic
ucagaagcgggugcagaacgu

SEQ ID NO: 8312 - RNA, 21 nt, Artificial Sequence
  Synthetic
ucagugacguucugcacccgc

SEQ ID NO: 8313 - RNA, 21 nt, Artificial Sequence
  Synthetic
ucugauaauccuccagcagaa

SEQ ID NO: 8314 - RNA, 21 nt, Artificial Sequence
  Synthetic
ucugcacccgcuucugauaau

SEQ ID NO: 8315 - RNA, 21 nt, Artificial Sequence
  Synthetic
ucugcuggaggauuaucagaa

SEQ ID NO: 8316 - RNA, 21 nt, Artificial Sequence
  Synthetic
ugacguucugcacccgcuucu

SEQ ID NO: 8317 - RNA, 21 nt, Artificial Sequence
  Synthetic
ugcacccgcuucugauaaucc

SEQ ID NO: 8318 - RNA, 21 nt, Artificial Sequence
  Synthetic
ugcuggaggauuaucagaagc

SEQ ID NO: 8319 - RNA, 21 nt, Artificial Sequence
  Synthetic
uggaggauuaucagaagcggg

SEQ ID NO: 8320 - RNA, 21 nt, Artificial Sequence
  Synthetic
uggauucugcuggaggauuau

SEQ ID NO: 8321 - RNA, 21 nt, Artificial Sequence
  Synthetic
uuaucagaagcgggugcagaa

SEQ ID NO: 8322 - RNA, 21 nt, Artificial Sequence
  Synthetic
uucugauaauccuccagcaga

SEQ ID NO: 8323 - RNA, 21 nt, Artificial Sequence
  Synthetic
uucugcacccgcuucugauaa

SEQ ID NO: 8324 - RNA, 21 nt, Artificial Sequence
  Synthetic
uucugcuggaggauuaucaga

SEQ ID NO: 8325 - RNA, 22 nt, Artificial Sequence
  Synthetic
aaguggauucugcuggaggauu

SEQ ID NO: 8326 - RNA, 22 nt, Artificial Sequence
  Synthetic
acccgcuucugauaauccucca

SEQ ID NO: 8327 - RNA, 22 nt, Artificial Sequence
  Synthetic
acguucugcacccgcuucugau

SEQ ID NO: 8328 - RNA, 22 nt, Artificial Sequence
  Synthetic
aggauuaucagaagcgggugca

SEQ ID NO: 8329 - RNA, 22 nt, Artificial Sequence
  Synthetic
agugacguucugcacccgcuuc

SEQ ID NO: 8330 - RNA, 22 nt, Artificial Sequence
  Synthetic
aguggauucugcuggaggauua

SEQ ID NO: 8331 - RNA, 22 nt, Artificial Sequence
  Synthetic
aucagaagcgggugcagaacgu

SEQ ID NO: 8332 - RNA, 22 nt, Artificial Sequence
  Synthetic
auuaucagaagcgggugcagaa

SEQ ID NO: 8333 - RNA, 22 nt, Artificial Sequence
  Synthetic
auucugcuggaggauuaucaga

SEQ ID NO: 8334 - RNA, 22 nt, Artificial Sequence
  Synthetic
cacccgcuucugauaauccucc

SEQ ID NO: 8335 - RNA, 22 nt, Artificial Sequence
  Synthetic
cagaagcgggugcagaacguca

SEQ ID NO: 8336 - RNA, 22 nt, Artificial Sequence
  Synthetic
cagugacguucugcacccgcuu

SEQ ID NO: 8337 - RNA, 22 nt, Artificial Sequence
  Synthetic
cccgcuucugauaauccuccag

SEQ ID NO: 8338 - RNA, 22 nt, Artificial Sequence
  Synthetic
ccgcuucugauaauccuccagc

SEQ ID NO: 8339 - RNA, 22 nt, Artificial Sequence
  Synthetic
cgcuucugauaauccuccagca

SEQ ID NO: 8340 - RNA, 22 nt, Artificial Sequence
  Synthetic
cguucugcacccgcuucugaua

SEQ ID NO: 8341 - RNA, 22 nt, Artificial Sequence
  Synthetic
cucagugacguucugcacccgc

SEQ ID NO: 8342 - RNA, 22 nt, Artificial Sequence
  Synthetic
cugauaauccuccagcagaauc

SEQ ID NO: 8343 - RNA, 22 nt, Artificial Sequence
  Synthetic
cugcacccgcuucugauaaucc

SEQ ID NO: 8344 - RNA, 22 nt, Artificial Sequence
  Synthetic
cugcuggaggauuaucagaagc

SEQ ID NO: 8345 - RNA, 22 nt, Artificial Sequence
  Synthetic
cuggaggauuaucagaagcggg

SEQ ID NO: 8346 - RNA, 22 nt, Artificial Sequence
  Synthetic
cuucugauaauccuccagcaga

SEQ ID NO: 8347 - RNA, 22 nt, Artificial Sequence
  Synthetic
gacguucugcacccgcuucuga

SEQ ID NO: 8348 - RNA, 22 nt, Artificial Sequence
  Synthetic
gaggauuaucagaagcgggugc

SEQ ID NO: 8349 - RNA, 22 nt, Artificial Sequence
  Synthetic
gauuaucagaagcgggugcaga

SEQ ID NO: 8350 - RNA, 22 nt, Artificial Sequence
  Synthetic
gauucugcuggaggauuaucag

SEQ ID NO: 8351 - RNA, 22 nt, Artificial Sequence
  Synthetic
gcacccgcuucugauaauccuc

SEQ ID NO: 8352 - RNA, 22 nt, Artificial Sequence
  Synthetic
gcuggaggauuaucagaagcgg

SEQ ID NO: 8353 - RNA, 22 nt, Artificial Sequence
  Synthetic
gcuucugauaauccuccagcag

SEQ ID NO: 8354 - RNA, 22 nt, Artificial Sequence
  Synthetic
ggaggauuaucagaagcgggug

SEQ ID NO: 8355 - RNA, 22 nt, Artificial Sequence
  Synthetic
ggauuaucagaagcgggugcag

SEQ ID NO: 8356 - RNA, 22 nt, Artificial Sequence
  Synthetic
ggauucugcuggaggauuauca

SEQ ID NO: 8357 - RNA, 22 nt, Artificial Sequence
  Synthetic
gugacguucugcacccgcuucu

SEQ ID NO: 8358 - RNA, 22 nt, Artificial Sequence
  Synthetic
guggauucugcuggaggauuau

SEQ ID NO: 8359 - RNA, 22 nt, Artificial Sequence
  Synthetic
guucugcacccgcuucugauaa

SEQ ID NO: 8360 - RNA, 22 nt, Artificial Sequence
  Synthetic
uaucagaagcgggugcagaacg

SEQ ID NO: 8361 - RNA, 22 nt, Artificial Sequence
  Synthetic
ucagaagcgggugcagaacguc

SEQ ID NO: 8362 - RNA, 22 nt, Artificial Sequence
  Synthetic
ucagugacguucugcacccgcu

SEQ ID NO: 8363 - RNA, 22 nt, Artificial Sequence
  Synthetic
ucugauaauccuccagcagaau

SEQ ID NO: 8364 - RNA, 22 nt, Artificial Sequence
  Synthetic
ucugcacccgcuucugauaauc

SEQ ID NO: 8365 - RNA, 22 nt, Artificial Sequence
  Synthetic
ucugcuggaggauuaucagaag

SEQ ID NO: 8366 - RNA, 22 nt, Artificial Sequence
  Synthetic
ugacguucugcacccgcuucug

SEQ ID NO: 8367 - RNA, 22 nt, Artificial Sequence
  Synthetic
ugcacccgcuucugauaauccu

SEQ ID NO: 8368 - RNA, 22 nt, Artificial Sequence
  Synthetic
ugcuggaggauuaucagaagcg

SEQ ID NO: 8369 - RNA, 22 nt, Artificial Sequence
  Synthetic
uggaggauuaucagaagcgggu

SEQ ID NO: 8370 - RNA, 22 nt, Artificial Sequence
  Synthetic
uggauucugcuggaggauuauc

SEQ ID NO: 8371 - RNA, 22 nt, Artificial Sequence
  Synthetic
uuaucagaagcgggugcagaac

SEQ ID NO: 8372 - RNA, 22 nt, Artificial Sequence
  Synthetic
uucugauaauccuccagcagaa

SEQ ID NO: 8373 - RNA, 22 nt, Artificial Sequence
  Synthetic
uucugcacccgcuucugauaau

SEQ ID NO: 8374 - RNA, 22 nt, Artificial Sequence
  Synthetic
uucugcuggaggauuaucagaa

SEQ ID NO: 8375 - RNA, 20 nt, Artificial Sequence
  Synthetic
aacauuuuucugauggaugg

SEQ ID NO: 8376 - RNA, 20 nt, Artificial Sequence
  Synthetic
aacuccccauccaucagaaa

SEQ ID NO: 8377 - RNA, 20 nt, Artificial Sequence
  Synthetic
acauuuuucugauggauggg

SEQ ID NO: 8378 - RNA, 20 nt, Artificial Sequence
  Synthetic
acccaacuccccauccauca

SEQ ID NO: 8379 - RNA, 20 nt, Artificial Sequence
  Synthetic
acuccccauccaucagaaaa

SEQ ID NO: 8380 - RNA, 20 nt, Artificial Sequence
  Synthetic
acuuggaacauuuuucugau

SEQ ID NO: 8381 - RNA, 20 nt, Artificial Sequence
  Synthetic
agauuugcucacccaacucc

SEQ ID NO: 8382 - RNA, 20 nt, Artificial Sequence
  Synthetic
auggauggggaguuggguga

SEQ ID NO: 8383 - RNA, 20 nt, Artificial Sequence
  Synthetic
auggggaguugggugagcaa

SEQ ID NO: 8384 - RNA, 20 nt, Artificial Sequence
  Synthetic
auuugcucacccaacucccc

SEQ ID NO: 8385 - RNA, 20 nt, Artificial Sequence
  Synthetic
auuuuucugauggaugggga

SEQ ID NO: 8386 - RNA, 20 nt, Artificial Sequence
  Synthetic
caacuccccauccaucagaa

SEQ ID NO: 8387 - RNA, 20 nt, Artificial Sequence
  Synthetic
cacccaacuccccauccauc

SEQ ID NO: 8388 - RNA, 20 nt, Artificial Sequence
  Synthetic
cagauuugcucacccaacuc

SEQ ID NO: 8389 - RNA, 20 nt, Artificial Sequence
  Synthetic
cauccaucagaaaaauguuc

SEQ ID NO: 8390 - RNA, 20 nt, Artificial Sequence
  Synthetic
cauuuuucugauggaugggg

SEQ ID NO: 8391 - RNA, 20 nt, Artificial Sequence
  Synthetic
ccaacuccccauccaucaga

SEQ ID NO: 8392 - RNA, 20 nt, Artificial Sequence
  Synthetic
ccauccaucagaaaaauguu

SEQ ID NO: 8393 - RNA, 20 nt, Artificial Sequence
  Synthetic
cccaacuccccauccaucag

SEQ ID NO: 8394 - RNA, 20 nt, Artificial Sequence
  Synthetic
cccauccaucagaaaaaugu

SEQ ID NO: 8395 - RNA, 20 nt, Artificial Sequence
  Synthetic
ccccauccaucagaaaaaug

SEQ ID NO: 8396 - RNA, 20 nt, Artificial Sequence
  Synthetic
cucacccaacuccccaucca

SEQ ID NO: 8397 - RNA, 20 nt, Artificial Sequence
  Synthetic
cuccccauccaucagaaaaa

SEQ ID NO: 8398 - RNA, 20 nt, Artificial Sequence
  Synthetic
cugauggauggggaguuggg

SEQ ID NO: 8399 - RNA, 20 nt, Artificial Sequence
  Synthetic
cuuggaacauuuuucugaug

SEQ ID NO: 8400 - RNA, 20 nt, Artificial Sequence
  Synthetic
gaacauuuuucugauggaug

SEQ ID NO: 8401 - RNA, 20 nt, Artificial Sequence
  Synthetic
gauggauggggaguugggug

SEQ ID NO: 8402 - RNA, 20 nt, Artificial Sequence
  Synthetic
gauggggaguugggugagca

SEQ ID NO: 8403 - RNA, 20 nt, Artificial Sequence
  Synthetic
gauuugcucacccaacuccc

SEQ ID NO: 8404 - RNA, 20 nt, Artificial Sequence
  Synthetic
gcucacccaacuccccaucc

SEQ ID NO: 8405 - RNA, 20 nt, Artificial Sequence
  Synthetic
ggaacauuuuucugauggau

SEQ ID NO: 8406 - RNA, 20 nt, Artificial Sequence
  Synthetic
ggauggggaguugggugagc

SEQ ID NO: 8407 - RNA, 20 nt, Artificial Sequence
  Synthetic
ucacccaacuccccauccau

SEQ ID NO: 8408 - RNA, 20 nt, Artificial Sequence
  Synthetic
uccccauccaucagaaaaau

SEQ ID NO: 8409 - RNA, 20 nt, Artificial Sequence
  Synthetic
ucugauggauggggaguugg

SEQ ID NO: 8410 - RNA, 20 nt, Artificial Sequence
  Synthetic
ugauggauggggaguugggu

SEQ ID NO: 8411 - RNA, 20 nt, Artificial Sequence
  Synthetic
ugcucacccaacuccccauc

SEQ ID NO: 8412 - RNA, 20 nt, Artificial Sequence
  Synthetic
uggaacauuuuucugaugga

SEQ ID NO: 8413 - RNA, 20 nt, Artificial Sequence
  Synthetic
uggauggggaguugggugag

SEQ ID NO: 8414 - RNA, 20 nt, Artificial Sequence
  Synthetic
uucugauggauggggaguug

SEQ ID NO: 8415 - RNA, 20 nt, Artificial Sequence
  Synthetic
uugcucacccaacuccccau

SEQ ID NO: 8416 - RNA, 20 nt, Artificial Sequence
  Synthetic
uuggaacauuuuucugaugg

SEQ ID NO: 8417 - RNA, 20 nt, Artificial Sequence
  Synthetic
uuucugauggauggggaguu

SEQ ID NO: 8418 - RNA, 20 nt, Artificial Sequence
  Synthetic
uuugcucacccaacucccca

SEQ ID NO: 8419 - RNA, 20 nt, Artificial Sequence
  Synthetic
uuuucugauggauggggagu

SEQ ID NO: 8420 - RNA, 20 nt, Artificial Sequence
  Synthetic
uuuuucugauggauggggag

SEQ ID NO: 8421 - RNA, 21 nt, Artificial Sequence
  Synthetic
aacauuuuucugauggauggg

SEQ ID NO: 8422 - RNA, 21 nt, Artificial Sequence
  Synthetic
aacuccccauccaucagaaaa

SEQ ID NO: 8423 - RNA, 21 nt, Artificial Sequence
  Synthetic
acauuuuucugauggaugggg

SEQ ID NO: 8424 - RNA, 21 nt, Artificial Sequence
  Synthetic
acccaacuccccauccaucag

SEQ ID NO: 8425 - RNA, 21 nt, Artificial Sequence
  Synthetic
acuccccauccaucagaaaaa

SEQ ID NO: 8426 - RNA, 21 nt, Artificial Sequence
  Synthetic
acuuggaacauuuuucugaug

SEQ ID NO: 8427 - RNA, 21 nt, Artificial Sequence
  Synthetic
agauuugcucacccaacuccc

SEQ ID NO: 8428 - RNA, 21 nt, Artificial Sequence
  Synthetic
auggauggggaguugggugag

SEQ ID NO: 8429 - RNA, 21 nt, Artificial Sequence
  Synthetic
auggggaguugggugagcaaa

SEQ ID NO: 8430 - RNA, 21 nt, Artificial Sequence
  Synthetic
auuugcucacccaacucccca

SEQ ID NO: 8431 - RNA, 21 nt, Artificial Sequence
  Synthetic
auuuuucugauggauggggag

SEQ ID NO: 8432 - RNA, 21 nt, Artificial Sequence
  Synthetic
caacuccccauccaucagaaa

SEQ ID NO: 8433 - RNA, 21 nt, Artificial Sequence
  Synthetic
cacccaacuccccauccauca

SEQ ID NO: 8434 - RNA, 21 nt, Artificial Sequence
  Synthetic
cacuuggaacauuuuucugau

SEQ ID NO: 8435 - RNA, 21 nt, Artificial Sequence
  Synthetic
cagauuugcucacccaacucc

SEQ ID NO: 8436 - RNA, 21 nt, Artificial Sequence
  Synthetic
cauccaucagaaaaauguucc

SEQ ID NO: 8437 - RNA, 21 nt, Artificial Sequence
  Synthetic
cauuuuucugauggaugggga

SEQ ID NO: 8438 - RNA, 21 nt, Artificial Sequence
  Synthetic
ccaacuccccauccaucagaa

SEQ ID NO: 8439 - RNA, 21 nt, Artificial Sequence
  Synthetic
ccauccaucagaaaaauguuc

SEQ ID NO: 8440 - RNA, 21 nt, Artificial Sequence
  Synthetic
cccaacuccccauccaucaga

SEQ ID NO: 8441 - RNA, 21 nt, Artificial Sequence
  Synthetic
cccauccaucagaaaaauguu

SEQ ID NO: 8442 - RNA, 21 nt, Artificial Sequence
  Synthetic
ccccauccaucagaaaaaugu

SEQ ID NO: 8443 - RNA, 21 nt, Artificial Sequence
  Synthetic
cucacccaacuccccauccau

SEQ ID NO: 8444 - RNA, 21 nt, Artificial Sequence
  Synthetic
cuccccauccaucagaaaaau

SEQ ID NO: 8445 - RNA, 21 nt, Artificial Sequence
  Synthetic
cugauggauggggaguugggu

SEQ ID NO: 8446 - RNA, 21 nt, Artificial Sequence
  Synthetic
cuuggaacauuuuucugaugg

SEQ ID NO: 8447 - RNA, 21 nt, Artificial Sequence
  Synthetic
gaacauuuuucugauggaugg

SEQ ID NO: 8448 - RNA, 21 nt, Artificial Sequence
  Synthetic
gauggauggggaguuggguga

SEQ ID NO: 8449 - RNA, 21 nt, Artificial Sequence
  Synthetic
gauggggaguugggugagcaa

SEQ ID NO: 8450 - RNA, 21 nt, Artificial Sequence
  Synthetic
gauuugcucacccaacucccc

SEQ ID NO: 8451 - RNA, 21 nt, Artificial Sequence
  Synthetic
gcucacccaacuccccaucca

SEQ ID NO: 8452 - RNA, 21 nt, Artificial Sequence
  Synthetic
ggaacauuuuucugauggaug

SEQ ID NO: 8453 - RNA, 21 nt, Artificial Sequence
  Synthetic
ggauggggaguugggugagca

SEQ ID NO: 8454 - RNA, 21 nt, Artificial Sequence
  Synthetic
ucacccaacuccccauccauc

SEQ ID NO: 8455 - RNA, 21 nt, Artificial Sequence
  Synthetic
ucagauuugcucacccaacuc

SEQ ID NO: 8456 - RNA, 21 nt, Artificial Sequence
  Synthetic
uccccauccaucagaaaaaug

SEQ ID NO: 8457 - RNA, 21 nt, Artificial Sequence
  Synthetic
ucugauggauggggaguuggg

SEQ ID NO: 8458 - RNA, 21 nt, Artificial Sequence
  Synthetic
ugauggauggggaguugggug

SEQ ID NO: 8459 - RNA, 21 nt, Artificial Sequence
  Synthetic
ugcucacccaacuccccaucc

SEQ ID NO: 8460 - RNA, 21 nt, Artificial Sequence
  Synthetic
uggaacauuuuucugauggau

SEQ ID NO: 8461 - RNA, 21 nt, Artificial Sequence
  Synthetic
uggauggggaguugggugagc

SEQ ID NO: 8462 - RNA, 21 nt, Artificial Sequence
  Synthetic
uucugauggauggggaguugg

SEQ ID NO: 8463 - RNA, 21 nt, Artificial Sequence
  Synthetic
uugcucacccaacuccccauc

SEQ ID NO: 8464 - RNA, 21 nt, Artificial Sequence
  Synthetic
uuggaacauuuuucugaugga

SEQ ID NO: 8465 - RNA, 21 nt, Artificial Sequence
  Synthetic
uuucugauggauggggaguug

SEQ ID NO: 8466 - RNA, 21 nt, Artificial Sequence
  Synthetic
uuugcucacccaacuccccau

SEQ ID NO: 8467 - RNA, 21 nt, Artificial Sequence
  Synthetic
uuuucugauggauggggaguu

SEQ ID NO: 8468 - RNA, 21 nt, Artificial Sequence
  Synthetic
uuuuucugauggauggggagu

SEQ ID NO: 8469 - RNA, 22 nt, Artificial Sequence
  Synthetic
aacauuuuucugauggaugggg

SEQ ID NO: 8470 - RNA, 22 nt, Artificial Sequence
  Synthetic
aacuccccauccaucagaaaaa

SEQ ID NO: 8471 - RNA, 22 nt, Artificial Sequence
  Synthetic
acauuuuucugauggaugggga

SEQ ID NO: 8472 - RNA, 22 nt, Artificial Sequence
  Synthetic
acccaacuccccauccaucaga

SEQ ID NO: 8473 - RNA, 22 nt, Artificial Sequence
  Synthetic
acuccccauccaucagaaaaau

SEQ ID NO: 8474 - RNA, 22 nt, Artificial Sequence
  Synthetic
acuuggaacauuuuucugaugg

SEQ ID NO: 8475 - RNA, 22 nt, Artificial Sequence
  Synthetic
agauuugcucacccaacucccc

SEQ ID NO: 8476 - RNA, 22 nt, Artificial Sequence
  Synthetic
auggauggggaguugggugagc

SEQ ID NO: 8477 - RNA, 22 nt, Artificial Sequence
  Synthetic
auggggaguugggugagcaaau

SEQ ID NO: 8478 - RNA, 22 nt, Artificial Sequence
  Synthetic
auuugcucacccaacuccccau

SEQ ID NO: 8479 - RNA, 22 nt, Artificial Sequence
  Synthetic
auuuuucugauggauggggagu

SEQ ID NO: 8480 - RNA, 22 nt, Artificial Sequence
  Synthetic
caacuccccauccaucagaaaa

SEQ ID NO: 8481 - RNA, 22 nt, Artificial Sequence
  Synthetic
cacccaacuccccauccaucag

SEQ ID NO: 8482 - RNA, 22 nt, Artificial Sequence
  Synthetic
cacuuggaacauuuuucugaug

SEQ ID NO: 8483 - RNA, 22 nt, Artificial Sequence
  Synthetic
cagauuugcucacccaacuccc

SEQ ID NO: 8484 - RNA, 22 nt, Artificial Sequence
  Synthetic
cauccaucagaaaaauguucca

SEQ ID NO: 8485 - RNA, 22 nt, Artificial Sequence
  Synthetic
cauuuuucugauggauggggag

SEQ ID NO: 8486 - RNA, 22 nt, Artificial Sequence
  Synthetic
ccaacuccccauccaucagaaa

SEQ ID NO: 8487 - RNA, 22 nt, Artificial Sequence
  Synthetic
ccacuuggaacauuuuucugau

SEQ ID NO: 8488 - RNA, 22 nt, Artificial Sequence
  Synthetic
ccauccaucagaaaaauguucc

SEQ ID NO: 8489 - RNA, 22 nt, Artificial Sequence
  Synthetic
cccaacuccccauccaucagaa

SEQ ID NO: 8490 - RNA, 22 nt, Artificial Sequence
  Synthetic
cccauccaucagaaaaauguuc

SEQ ID NO: 8491 - RNA, 22 nt, Artificial Sequence
  Synthetic
ccccauccaucagaaaaauguu

SEQ ID NO: 8492 - RNA, 22 nt, Artificial Sequence
  Synthetic
cucacccaacuccccauccauc

SEQ ID NO: 8493 - RNA, 22 nt, Artificial Sequence
  Synthetic
cuccccauccaucagaaaaaug

SEQ ID NO: 8494 - RNA, 22 nt, Artificial Sequence
  Synthetic
cugauggauggggaguugggug

SEQ ID NO: 8495 - RNA, 22 nt, Artificial Sequence
  Synthetic
cuuggaacauuuuucugaugga

SEQ ID NO: 8496 - RNA, 22 nt, Artificial Sequence
  Synthetic
gaacauuuuucugauggauggg

SEQ ID NO: 8497 - RNA, 22 nt, Artificial Sequence
  Synthetic
gauggauggggaguugggugag

SEQ ID NO: 8498 - RNA, 22 nt, Artificial Sequence
  Synthetic
gauggggaguugggugagcaaa

SEQ ID NO: 8499 - RNA, 22 nt, Artificial Sequence
  Synthetic
gauuugcucacccaacucccca

SEQ ID NO: 8500 - RNA, 22 nt, Artificial Sequence
  Synthetic
gcucacccaacuccccauccau

SEQ ID NO: 8501 - RNA, 22 nt, Artificial Sequence
  Synthetic
ggaacauuuuucugauggaugg

SEQ ID NO: 8502 - RNA, 22 nt, Artificial Sequence
  Synthetic
ggauggggaguugggugagcaa

SEQ ID NO: 8503 - RNA, 22 nt, Artificial Sequence
  Synthetic
ucacccaacuccccauccauca

SEQ ID NO: 8504 - RNA, 22 nt, Artificial Sequence
  Synthetic
ucagauuugcucacccaacucc

SEQ ID NO: 8505 - RNA, 22 nt, Artificial Sequence
  Synthetic
uccccauccaucagaaaaaugu

SEQ ID NO: 8506 - RNA, 22 nt, Artificial Sequence
  Synthetic
ucugauggauggggaguugggu

SEQ ID NO: 8507 - RNA, 22 nt, Artificial Sequence
  Synthetic
ugauggauggggaguuggguga

SEQ ID NO: 8508 - RNA, 22 nt, Artificial Sequence
  Synthetic
ugcucacccaacuccccaucca

SEQ ID NO: 8509 - RNA, 22 nt, Artificial Sequence
  Synthetic
uggaacauuuuucugauggaug

SEQ ID NO: 8510 - RNA, 22 nt, Artificial Sequence
  Synthetic
uggauggggaguugggugagca

SEQ ID NO: 8511 - RNA, 22 nt, Artificial Sequence
  Synthetic
uucagauuugcucacccaacuc

SEQ ID NO: 8512 - RNA, 22 nt, Artificial Sequence
  Synthetic
uucugauggauggggaguuggg

SEQ ID NO: 8513 - RNA, 22 nt, Artificial Sequence
  Synthetic
uugcucacccaacuccccaucc

SEQ ID NO: 8514 - RNA, 22 nt, Artificial Sequence
  Synthetic
uuggaacauuuuucugauggau

SEQ ID NO: 8515 - RNA, 22 nt, Artificial Sequence
  Synthetic
uuucugauggauggggaguugg

SEQ ID NO: 8516 - RNA, 22 nt, Artificial Sequence
  Synthetic
uuugcucacccaacuccccauc

SEQ ID NO: 8517 - RNA, 22 nt, Artificial Sequence
  Synthetic
uuuucugauggauggggaguug

SEQ ID NO: 8518 - RNA, 22 nt, Artificial Sequence
  Synthetic
uuuuucugauggauggggaguu

SEQ ID NO: 8519 - RNA, 20 nt, Artificial Sequence
  Synthetic
aaaucugaacggcaugaucc

SEQ ID NO: 8520 - RNA, 20 nt, Artificial Sequence
  Synthetic
aacggcaugaucccccuugg

SEQ ID NO: 8521 - RNA, 20 nt, Artificial Sequence
  Synthetic
aagggggaucaugccguuca

SEQ ID NO: 8522 - RNA, 20 nt, Artificial Sequence
  Synthetic
aaucugaacggcaugauccc

SEQ ID NO: 8523 - RNA, 20 nt, Artificial Sequence
  Synthetic
accccaagggggaucaugcc

SEQ ID NO: 8524 - RNA, 20 nt, Artificial Sequence
  Synthetic
acggcaugaucccccuuggg

SEQ ID NO: 8525 - RNA, 20 nt, Artificial Sequence
  Synthetic
agcaaaucugaacggcauga

SEQ ID NO: 8526 - RNA, 20 nt, Artificial Sequence
  Synthetic
agggggaucaugccguucag

SEQ ID NO: 8527 - RNA, 20 nt, Artificial Sequence
  Synthetic
aguugggugagcaaaucuga

SEQ ID NO: 8528 - RNA, 20 nt, Artificial Sequence
  Synthetic
aucaugccguucagauuugc

SEQ ID NO: 8529 - RNA, 20 nt, Artificial Sequence
  Synthetic
aucugaacggcaugaucccc

SEQ ID NO: 8530 - RNA, 20 nt, Artificial Sequence
  Synthetic
augccguucagauuugcuca

SEQ ID NO: 8531 - RNA, 20 nt, Artificial Sequence
  Synthetic
caaaucugaacggcaugauc

SEQ ID NO: 8532 - RNA, 20 nt, Artificial Sequence
  Synthetic
caagggggaucaugccguuc

SEQ ID NO: 8533 - RNA, 20 nt, Artificial Sequence
  Synthetic
caccccaagggggaucaugc

SEQ ID NO: 8534 - RNA, 20 nt, Artificial Sequence
  Synthetic
caugccguucagauuugcuc

SEQ ID NO: 8535 - RNA, 20 nt, Artificial Sequence
  Synthetic
ccaagggggaucaugccguu

SEQ ID NO: 8536 - RNA, 20 nt, Artificial Sequence
  Synthetic
cccaagggggaucaugccgu

SEQ ID NO: 8537 - RNA, 20 nt, Artificial Sequence
  Synthetic
ccccaagggggaucaugccg

SEQ ID NO: 8538 - RNA, 20 nt, Artificial Sequence
  Synthetic
ccguucagauuugcucaccc

SEQ ID NO: 8539 - RNA, 20 nt, Artificial Sequence
  Synthetic
cggcaugaucccccuugggg

SEQ ID NO: 8540 - RNA, 20 nt, Artificial Sequence
  Synthetic
cugaacggcaugaucccccu

SEQ ID NO: 8541 - RNA, 20 nt, Artificial Sequence
  Synthetic
gaacggcaugaucccccuug

SEQ ID NO: 8542 - RNA, 20 nt, Artificial Sequence
  Synthetic
gagcaaaucugaacggcaug

SEQ ID NO: 8543 - RNA, 20 nt, Artificial Sequence
  Synthetic
gaguugggugagcaaaucug

SEQ ID NO: 8544 - RNA, 20 nt, Artificial Sequence
  Synthetic
gaucaugccguucagauuug

SEQ ID NO: 8545 - RNA, 20 nt, Artificial Sequence
  Synthetic
gcaaaucugaacggcaugau

SEQ ID NO: 8546 - RNA, 20 nt, Artificial Sequence
  Synthetic
gccguucagauuugcucacc

SEQ ID NO: 8547 - RNA, 20 nt, Artificial Sequence
  Synthetic
ggaucaugccguucagauuu

SEQ ID NO: 8548 - RNA, 20 nt, Artificial Sequence
  Synthetic
gggaucaugccguucagauu

SEQ ID NO: 8549 - RNA, 20 nt, Artificial Sequence
  Synthetic
ggggaucaugccguucagau

SEQ ID NO: 8550 - RNA, 20 nt, Artificial Sequence
  Synthetic
gggggaucaugccguucaga

SEQ ID NO: 8551 - RNA, 20 nt, Artificial Sequence
  Synthetic
gggugagcaaaucugaacgg

SEQ ID NO: 8552 - RNA, 20 nt, Artificial Sequence
  Synthetic
ggugagcaaaucugaacggc

SEQ ID NO: 8553 - RNA, 20 nt, Artificial Sequence
  Synthetic
gugagcaaaucugaacggca

SEQ ID NO: 8554 - RNA, 20 nt, Artificial Sequence
  Synthetic
guugggugagcaaaucugaa

SEQ ID NO: 8555 - RNA, 20 nt, Artificial Sequence
  Synthetic
ucaccccaagggggaucaug

SEQ ID NO: 8556 - RNA, 20 nt, Artificial Sequence
  Synthetic
ucaugccguucagauuugcu

SEQ ID NO: 8557 - RNA, 20 nt, Artificial Sequence
  Synthetic
ucugaacggcaugauccccc

SEQ ID NO: 8558 - RNA, 20 nt, Artificial Sequence
  Synthetic
ugaacggcaugaucccccuu

SEQ ID NO: 8559 - RNA, 20 nt, Artificial Sequence
  Synthetic
ugagcaaaucugaacggcau

SEQ ID NO: 8560 - RNA, 20 nt, Artificial Sequence
  Synthetic
ugccguucagauuugcucac

SEQ ID NO: 8561 - RNA, 20 nt, Artificial Sequence
  Synthetic
ugggugagcaaaucugaacg

SEQ ID NO: 8562 - RNA, 20 nt, Artificial Sequence
  Synthetic
uucaccccaagggggaucau

SEQ ID NO: 8563 - RNA, 20 nt, Artificial Sequence
  Synthetic
uugggugagcaaaucugaac

SEQ ID NO: 8564 - RNA, 20 nt, Artificial Sequence
  Synthetic
uuucaccccaagggggauca

SEQ ID NO: 8565 - RNA, 21 nt, Artificial Sequence
  Synthetic
aaaucugaacggcaugauccc

SEQ ID NO: 8566 - RNA, 21 nt, Artificial Sequence
  Synthetic
aacggcaugaucccccuuggg

SEQ ID NO: 8567 - RNA, 21 nt, Artificial Sequence
  Synthetic
aagggggaucaugccguucag

SEQ ID NO: 8568 - RNA, 21 nt, Artificial Sequence
  Synthetic
aaucugaacggcaugaucccc

SEQ ID NO: 8569 - RNA, 21 nt, Artificial Sequence
  Synthetic
accccaagggggaucaugccg

SEQ ID NO: 8570 - RNA, 21 nt, Artificial Sequence
  Synthetic
acggcaugaucccccuugggg

SEQ ID NO: 8571 - RNA, 21 nt, Artificial Sequence
  Synthetic
agcaaaucugaacggcaugau

SEQ ID NO: 8572 - RNA, 21 nt, Artificial Sequence
  Synthetic
agggggaucaugccguucaga

SEQ ID NO: 8573 - RNA, 21 nt, Artificial Sequence
  Synthetic
aguugggugagcaaaucugaa

SEQ ID NO: 8574 - RNA, 21 nt, Artificial Sequence
  Synthetic
aucaugccguucagauuugcu

SEQ ID NO: 8575 - RNA, 21 nt, Artificial Sequence
  Synthetic
aucugaacggcaugauccccc

SEQ ID NO: 8576 - RNA, 21 nt, Artificial Sequence
  Synthetic
augccguucagauuugcucac

SEQ ID NO: 8577 - RNA, 21 nt, Artificial Sequence
  Synthetic
caaaucugaacggcaugaucc

SEQ ID NO: 8578 - RNA, 21 nt, Artificial Sequence
  Synthetic
caagggggaucaugccguuca

SEQ ID NO: 8579 - RNA, 21 nt, Artificial Sequence
  Synthetic
caccccaagggggaucaugcc

SEQ ID NO: 8580 - RNA, 21 nt, Artificial Sequence
  Synthetic
caugccguucagauuugcuca

SEQ ID NO: 8581 - RNA, 21 nt, Artificial Sequence
  Synthetic
ccaagggggaucaugccguuc

SEQ ID NO: 8582 - RNA, 21 nt, Artificial Sequence
  Synthetic
cccaagggggaucaugccguu

SEQ ID NO: 8583 - RNA, 21 nt, Artificial Sequence
  Synthetic
ccccaagggggaucaugccgu

SEQ ID NO: 8584 - RNA, 21 nt, Artificial Sequence
  Synthetic
ccguucagauuugcucaccca

SEQ ID NO: 8585 - RNA, 21 nt, Artificial Sequence
  Synthetic
cggcaugaucccccuuggggu

SEQ ID NO: 8586 - RNA, 21 nt, Artificial Sequence
  Synthetic
cugaacggcaugaucccccuu

SEQ ID NO: 8587 - RNA, 21 nt, Artificial Sequence
  Synthetic
gaacggcaugaucccccuugg

SEQ ID NO: 8588 - RNA, 21 nt, Artificial Sequence
  Synthetic
gagcaaaucugaacggcauga

SEQ ID NO: 8589 - RNA, 21 nt, Artificial Sequence
  Synthetic
gaguugggugagcaaaucuga

SEQ ID NO: 8590 - RNA, 21 nt, Artificial Sequence
  Synthetic
gaucaugccguucagauuugc

SEQ ID NO: 8591 - RNA, 21 nt, Artificial Sequence
  Synthetic
gcaaaucugaacggcaugauc

SEQ ID NO: 8592 - RNA, 21 nt, Artificial Sequence
  Synthetic
gccguucagauuugcucaccc

SEQ ID NO: 8593 - RNA, 21 nt, Artificial Sequence
  Synthetic
ggaguugggugagcaaaucug

SEQ ID NO: 8594 - RNA, 21 nt, Artificial Sequence
  Synthetic
ggaucaugccguucagauuug

SEQ ID NO: 8595 - RNA, 21 nt, Artificial Sequence
  Synthetic
gggaucaugccguucagauuu

SEQ ID NO: 8596 - RNA, 21 nt, Artificial Sequence
  Synthetic
ggggaucaugccguucagauu

SEQ ID NO: 8597 - RNA, 21 nt, Artificial Sequence
  Synthetic
gggggaucaugccguucagau

SEQ ID NO: 8598 - RNA, 21 nt, Artificial Sequence
  Synthetic
gggugagcaaaucugaacggc

SEQ ID NO: 8599 - RNA, 21 nt, Artificial Sequence
  Synthetic
ggugagcaaaucugaacggca

SEQ ID NO: 8600 - RNA, 21 nt, Artificial Sequence
  Synthetic
gugagcaaaucugaacggcau

SEQ ID NO: 8601 - RNA, 21 nt, Artificial Sequence
  Synthetic
guugggugagcaaaucugaac

SEQ ID NO: 8602 - RNA, 21 nt, Artificial Sequence
  Synthetic
guuucaccccaagggggauca

SEQ ID NO: 8603 - RNA, 21 nt, Artificial Sequence
  Synthetic
ucaccccaagggggaucaugc

SEQ ID NO: 8604 - RNA, 21 nt, Artificial Sequence
  Synthetic
ucaugccguucagauuugcuc

SEQ ID NO: 8605 - RNA, 21 nt, Artificial Sequence
  Synthetic
ucugaacggcaugaucccccu

SEQ ID NO: 8606 - RNA, 21 nt, Artificial Sequence
  Synthetic
ugaacggcaugaucccccuug

SEQ ID NO: 8607 - RNA, 21 nt, Artificial Sequence
  Synthetic
ugagcaaaucugaacggcaug

SEQ ID NO: 8608 - RNA, 21 nt, Artificial Sequence
  Synthetic
ugccguucagauuugcucacc

SEQ ID NO: 8609 - RNA, 21 nt, Artificial Sequence
  Synthetic
ugggugagcaaaucugaacgg

SEQ ID NO: 8610 - RNA, 21 nt, Artificial Sequence
  Synthetic
uucaccccaagggggaucaug

SEQ ID NO: 8611 - RNA, 21 nt, Artificial Sequence
  Synthetic
uugggugagcaaaucugaacg

SEQ ID NO: 8612 - RNA, 21 nt, Artificial Sequence
  Synthetic
uuucaccccaagggggaucau

SEQ ID NO: 8613 - RNA, 22 nt, Artificial Sequence
  Synthetic
aaaucugaacggcaugaucccc

SEQ ID NO: 8614 - RNA, 22 nt, Artificial Sequence
  Synthetic
aacggcaugaucccccuugggg

SEQ ID NO: 8615 - RNA, 22 nt, Artificial Sequence
  Synthetic
aagggggaucaugccguucaga

SEQ ID NO: 8616 - RNA, 22 nt, Artificial Sequence
  Synthetic
aaucugaacggcaugauccccc

SEQ ID NO: 8617 - RNA, 22 nt, Artificial Sequence
  Synthetic
accccaagggggaucaugccgu

SEQ ID NO: 8618 - RNA, 22 nt, Artificial Sequence
  Synthetic
acggcaugaucccccuuggggu

SEQ ID NO: 8619 - RNA, 22 nt, Artificial Sequence
  Synthetic
agcaaaucugaacggcaugauc

SEQ ID NO: 8620 - RNA, 22 nt, Artificial Sequence
  Synthetic
agggggaucaugccguucagau

SEQ ID NO: 8621 - RNA, 22 nt, Artificial Sequence
  Synthetic
aguugggugagcaaaucugaac

SEQ ID NO: 8622 - RNA, 22 nt, Artificial Sequence
  Synthetic
aucaugccguucagauuugcuc

SEQ ID NO: 8623 - RNA, 22 nt, Artificial Sequence
  Synthetic
aucugaacggcaugaucccccu

SEQ ID NO: 8624 - RNA, 22 nt, Artificial Sequence
  Synthetic
augccguucagauuugcucacc

SEQ ID NO: 8625 - RNA, 22 nt, Artificial Sequence
  Synthetic
caaaucugaacggcaugauccc

SEQ ID NO: 8626 - RNA, 22 nt, Artificial Sequence
  Synthetic
caagggggaucaugccguucag

SEQ ID NO: 8627 - RNA, 22 nt, Artificial Sequence
  Synthetic
caccccaagggggaucaugccg

SEQ ID NO: 8628 - RNA, 22 nt, Artificial Sequence
  Synthetic
caugccguucagauuugcucac

SEQ ID NO: 8629 - RNA, 22 nt, Artificial Sequence
  Synthetic
ccaagggggaucaugccguuca

SEQ ID NO: 8630 - RNA, 22 nt, Artificial Sequence
  Synthetic
cccaagggggaucaugccguuc

SEQ ID NO: 8631 - RNA, 22 nt, Artificial Sequence
  Synthetic
ccccaagggggaucaugccguu

SEQ ID NO: 8632 - RNA, 22 nt, Artificial Sequence
  Synthetic
ccguucagauuugcucacccaa

SEQ ID NO: 8633 - RNA, 22 nt, Artificial Sequence
  Synthetic
cggcaugaucccccuuggggug

SEQ ID NO: 8634 - RNA, 22 nt, Artificial Sequence
  Synthetic
cugaacggcaugaucccccuug

SEQ ID NO: 8635 - RNA, 22 nt, Artificial Sequence
  Synthetic
gaacggcaugaucccccuuggg

SEQ ID NO: 8636 - RNA, 22 nt, Artificial Sequence
  Synthetic
gagcaaaucugaacggcaugau

SEQ ID NO: 8637 - RNA, 22 nt, Artificial Sequence
  Synthetic
gaguugggugagcaaaucugaa

SEQ ID NO: 8638 - RNA, 22 nt, Artificial Sequence
  Synthetic
gaucaugccguucagauuugcu

SEQ ID NO: 8639 - RNA, 22 nt, Artificial Sequence
  Synthetic
gcaaaucugaacggcaugaucc

SEQ ID NO: 8640 - RNA, 22 nt, Artificial Sequence
  Synthetic
gccguucagauuugcucaccca

SEQ ID NO: 8641 - RNA, 22 nt, Artificial Sequence
  Synthetic
ggaguugggugagcaaaucuga

SEQ ID NO: 8642 - RNA, 22 nt, Artificial Sequence
  Synthetic
ggaucaugccguucagauuugc

SEQ ID NO: 8643 - RNA, 22 nt, Artificial Sequence
  Synthetic
gggaguugggugagcaaaucug

SEQ ID NO: 8644 - RNA, 22 nt, Artificial Sequence
  Synthetic
gggaucaugccguucagauuug

SEQ ID NO: 8645 - RNA, 22 nt, Artificial Sequence
  Synthetic
ggggaucaugccguucagauuu

SEQ ID NO: 8646 - RNA, 22 nt, Artificial Sequence
  Synthetic
gggggaucaugccguucagauu

SEQ ID NO: 8647 - RNA, 22 nt, Artificial Sequence
  Synthetic
gggugagcaaaucugaacggca

SEQ ID NO: 8648 - RNA, 22 nt, Artificial Sequence
  Synthetic
ggugagcaaaucugaacggcau

SEQ ID NO: 8649 - RNA, 22 nt, Artificial Sequence
  Synthetic
gugagcaaaucugaacggcaug

SEQ ID NO: 8650 - RNA, 22 nt, Artificial Sequence
  Synthetic
guugggugagcaaaucugaacg

SEQ ID NO: 8651 - RNA, 22 nt, Artificial Sequence
  Synthetic
guuucaccccaagggggaucau

SEQ ID NO: 8652 - RNA, 22 nt, Artificial Sequence
  Synthetic
ucaccccaagggggaucaugcc

SEQ ID NO: 8653 - RNA, 22 nt, Artificial Sequence
  Synthetic
ucaugccguucagauuugcuca

SEQ ID NO: 8654 - RNA, 22 nt, Artificial Sequence
  Synthetic
ucugaacggcaugaucccccuu

SEQ ID NO: 8655 - RNA, 22 nt, Artificial Sequence
  Synthetic
ugaacggcaugaucccccuugg

SEQ ID NO: 8656 - RNA, 22 nt, Artificial Sequence
  Synthetic
ugagcaaaucugaacggcauga

SEQ ID NO: 8657 - RNA, 22 nt, Artificial Sequence
  Synthetic
ugccguucagauuugcucaccc

SEQ ID NO: 8658 - RNA, 22 nt, Artificial Sequence
  Synthetic
ugggugagcaaaucugaacggc

SEQ ID NO: 8659 - RNA, 22 nt, Artificial Sequence
  Synthetic
uguuucaccccaagggggauca

SEQ ID NO: 8660 - RNA, 22 nt, Artificial Sequence
  Synthetic
uucaccccaagggggaucaugc

SEQ ID NO: 8661 - RNA, 22 nt, Artificial Sequence
  Synthetic
uugggugagcaaaucugaacgg

SEQ ID NO: 8662 - RNA, 22 nt, Artificial Sequence
  Synthetic
uuucaccccaagggggaucaug

SEQ ID NO: 8663 - RNA, 20 nt, Artificial Sequence
  Synthetic
aaaucugaacugcaugcucc

SEQ ID NO: 8664 - RNA, 20 nt, Artificial Sequence
  Synthetic
aacugcaugcucccccuugg

SEQ ID NO: 8665 - RNA, 20 nt, Artificial Sequence
  Synthetic
aagggggagcaugcaguuca

SEQ ID NO: 8666 - RNA, 20 nt, Artificial Sequence
  Synthetic
aaucugaacugcaugcuccc

SEQ ID NO: 8667 - RNA, 20 nt, Artificial Sequence
  Synthetic
accccaagggggagcaugca

SEQ ID NO: 8668 - RNA, 20 nt, Artificial Sequence
  Synthetic
acugcaugcucccccuuggg

SEQ ID NO: 8669 - RNA, 20 nt, Artificial Sequence
  Synthetic
agcaaaucugaacugcaugc

SEQ ID NO: 8670 - RNA, 20 nt, Artificial Sequence
  Synthetic
agcaugcaguucagauuugc

SEQ ID NO: 8671 - RNA, 20 nt, Artificial Sequence
  Synthetic
agggggagcaugcaguucag

SEQ ID NO: 8672 - RNA, 20 nt, Artificial Sequence
  Synthetic
aucugaacugcaugcucccc

SEQ ID NO: 8673 - RNA, 20 nt, Artificial Sequence
  Synthetic
aucuguuucaccccaagggg

SEQ ID NO: 8674 - RNA, 20 nt, Artificial Sequence
  Synthetic
augcucccccuuggggugaa

SEQ ID NO: 8675 - RNA, 20 nt, Artificial Sequence
  Synthetic
caaaucugaacugcaugcuc

SEQ ID NO: 8676 - RNA, 20 nt, Artificial Sequence
  Synthetic
caagggggagcaugcaguuc

SEQ ID NO: 8677 - RNA, 20 nt, Artificial Sequence
  Synthetic
caccccaagggggagcaugc

SEQ ID NO: 8678 - RNA, 20 nt, Artificial Sequence
  Synthetic
caucuguuucaccccaaggg

SEQ ID NO: 8679 - RNA, 20 nt, Artificial Sequence
  Synthetic
caugcucccccuugggguga

SEQ ID NO: 8680 - RNA, 20 nt, Artificial Sequence
  Synthetic
ccaagggggagcaugcaguu

SEQ ID NO: 8681 - RNA, 20 nt, Artificial Sequence
  Synthetic
cccaagggggagcaugcagu

SEQ ID NO: 8682 - RNA, 20 nt, Artificial Sequence
  Synthetic
ccccaagggggagcaugcag

SEQ ID NO: 8683 - RNA, 20 nt, Artificial Sequence
  Synthetic
cugaacugcaugcucccccu

SEQ ID NO: 8684 - RNA, 20 nt, Artificial Sequence
  Synthetic
cugcaugcucccccuugggg

SEQ ID NO: 8685 - RNA, 20 nt, Artificial Sequence
  Synthetic
cuguuucaccccaaggggga

SEQ ID NO: 8686 - RNA, 20 nt, Artificial Sequence
  Synthetic
gaacugcaugcucccccuug

SEQ ID NO: 8687 - RNA, 20 nt, Artificial Sequence
  Synthetic
gagcaaaucugaacugcaug

SEQ ID NO: 8688 - RNA, 20 nt, Artificial Sequence
  Synthetic
gagcaugcaguucagauuug

SEQ ID NO: 8689 - RNA, 20 nt, Artificial Sequence
  Synthetic
gcaaaucugaacugcaugcu

SEQ ID NO: 8690 - RNA, 20 nt, Artificial Sequence
  Synthetic
gcaugcucccccuuggggug

SEQ ID NO: 8691 - RNA, 20 nt, Artificial Sequence
  Synthetic
gcucccccuuggggugaaac

SEQ ID NO: 8692 - RNA, 20 nt, Artificial Sequence
  Synthetic
ggagcaugcaguucagauuu

SEQ ID NO: 8693 - RNA, 20 nt, Artificial Sequence
  Synthetic
gggagcaugcaguucagauu

SEQ ID NO: 8694 - RNA, 20 nt, Artificial Sequence
  Synthetic
ggggagcaugcaguucagau

SEQ ID NO: 8695 - RNA, 20 nt, Artificial Sequence
  Synthetic
gggggagcaugcaguucaga

SEQ ID NO: 8696 - RNA, 20 nt, Artificial Sequence
  Synthetic
ggugagcaaaucugaacugc

SEQ ID NO: 8697 - RNA, 20 nt, Artificial Sequence
  Synthetic
gugagcaaaucugaacugca

SEQ ID NO: 8698 - RNA, 20 nt, Artificial Sequence
  Synthetic
guuucaccccaagggggagc

SEQ ID NO: 8699 - RNA, 20 nt, Artificial Sequence
  Synthetic
ucaccccaagggggagcaug

SEQ ID NO: 8700 - RNA, 20 nt, Artificial Sequence
  Synthetic
ucugaacugcaugcuccccc

SEQ ID NO: 8701 - RNA, 20 nt, Artificial Sequence
  Synthetic
ucuguuucaccccaaggggg

SEQ ID NO: 8702 - RNA, 20 nt, Artificial Sequence
  Synthetic
ugaacugcaugcucccccuu

SEQ ID NO: 8703 - RNA, 20 nt, Artificial Sequence
  Synthetic
ugagcaaaucugaacugcau

SEQ ID NO: 8704 - RNA, 20 nt, Artificial Sequence
  Synthetic
ugcaugcucccccuuggggu

SEQ ID NO: 8705 - RNA, 20 nt, Artificial Sequence
  Synthetic
ugcucccccuuggggugaaa

SEQ ID NO: 8706 - RNA, 20 nt, Artificial Sequence
  Synthetic
uguuucaccccaagggggag

SEQ ID NO: 8707 - RNA, 20 nt, Artificial Sequence
  Synthetic
uucaccccaagggggagcau

SEQ ID NO: 8708 - RNA, 20 nt, Artificial Sequence
  Synthetic
uuucaccccaagggggagca

SEQ ID NO: 8709 - RNA, 21 nt, Artificial Sequence
  Synthetic
aaaucugaacugcaugcuccc

SEQ ID NO: 8710 - RNA, 21 nt, Artificial Sequence
  Synthetic
aacugcaugcucccccuuggg

SEQ ID NO: 8711 - RNA, 21 nt, Artificial Sequence
  Synthetic
aagggggagcaugcaguucag

SEQ ID NO: 8712 - RNA, 21 nt, Artificial Sequence
  Synthetic
aaucugaacugcaugcucccc

SEQ ID NO: 8713 - RNA, 21 nt, Artificial Sequence
  Synthetic
acaucuguuucaccccaaggg

SEQ ID NO: 8714 - RNA, 21 nt, Artificial Sequence
  Synthetic
accccaagggggagcaugcag

SEQ ID NO: 8715 - RNA, 21 nt, Artificial Sequence
  Synthetic
acugcaugcucccccuugggg

SEQ ID NO: 8716 - RNA, 21 nt, Artificial Sequence
  Synthetic
agcaaaucugaacugcaugcu

SEQ ID NO: 8717 - RNA, 21 nt, Artificial Sequence
  Synthetic
agcaugcaguucagauuugcu

SEQ ID NO: 8718 - RNA, 21 nt, Artificial Sequence
  Synthetic
agggggagcaugcaguucaga

SEQ ID NO: 8719 - RNA, 21 nt, Artificial Sequence
  Synthetic
aucugaacugcaugcuccccc

SEQ ID NO: 8720 - RNA, 21 nt, Artificial Sequence
  Synthetic
aucuguuucaccccaaggggg

SEQ ID NO: 8721 - RNA, 21 nt, Artificial Sequence
  Synthetic
augcucccccuuggggugaaa

SEQ ID NO: 8722 - RNA, 21 nt, Artificial Sequence
  Synthetic
caaaucugaacugcaugcucc

SEQ ID NO: 8723 - RNA, 21 nt, Artificial Sequence
  Synthetic
caagggggagcaugcaguuca

SEQ ID NO: 8724 - RNA, 21 nt, Artificial Sequence
  Synthetic
caccccaagggggagcaugca

SEQ ID NO: 8725 - RNA, 21 nt, Artificial Sequence
  Synthetic
caucuguuucaccccaagggg

SEQ ID NO: 8726 - RNA, 21 nt, Artificial Sequence
  Synthetic
caugcucccccuuggggugaa

SEQ ID NO: 8727 - RNA, 21 nt, Artificial Sequence
  Synthetic
ccaagggggagcaugcaguuc

SEQ ID NO: 8728 - RNA, 21 nt, Artificial Sequence
  Synthetic
cccaagggggagcaugcaguu

SEQ ID NO: 8729 - RNA, 21 nt, Artificial Sequence
  Synthetic
ccccaagggggagcaugcagu

SEQ ID NO: 8730 - RNA, 21 nt, Artificial Sequence
  Synthetic
cugaacugcaugcucccccuu

SEQ ID NO: 8731 - RNA, 21 nt, Artificial Sequence
  Synthetic
cugcaugcucccccuuggggu

SEQ ID NO: 8732 - RNA, 21 nt, Artificial Sequence
  Synthetic
cuguuucaccccaagggggag

SEQ ID NO: 8733 - RNA, 21 nt, Artificial Sequence
  Synthetic
gaacugcaugcucccccuugg

SEQ ID NO: 8734 - RNA, 21 nt, Artificial Sequence
  Synthetic
gagcaaaucugaacugcaugc

SEQ ID NO: 8735 - RNA, 21 nt, Artificial Sequence
  Synthetic
gagcaugcaguucagauuugc

SEQ ID NO: 8736 - RNA, 21 nt, Artificial Sequence
  Synthetic
gcaaaucugaacugcaugcuc

SEQ ID NO: 8737 - RNA, 21 nt, Artificial Sequence
  Synthetic
gcaugcucccccuugggguga

SEQ ID NO: 8738 - RNA, 21 nt, Artificial Sequence
  Synthetic
gcucccccuuggggugaaaca

SEQ ID NO: 8739 - RNA, 21 nt, Artificial Sequence
  Synthetic
ggagcaugcaguucagauuug

SEQ ID NO: 8740 - RNA, 21 nt, Artificial Sequence
  Synthetic
gggagcaugcaguucagauuu

SEQ ID NO: 8741 - RNA, 21 nt, Artificial Sequence
  Synthetic
ggggagcaugcaguucagauu

SEQ ID NO: 8742 - RNA, 21 nt, Artificial Sequence
  Synthetic
gggggagcaugcaguucagau

SEQ ID NO: 8743 - RNA, 21 nt, Artificial Sequence
  Synthetic
gggugagcaaaucugaacugc

SEQ ID NO: 8744 - RNA, 21 nt, Artificial Sequence
  Synthetic
ggugagcaaaucugaacugca

SEQ ID NO: 8745 - RNA, 21 nt, Artificial Sequence
  Synthetic
gugagcaaaucugaacugcau

SEQ ID NO: 8746 - RNA, 21 nt, Artificial Sequence
  Synthetic
guuucaccccaagggggagca

SEQ ID NO: 8747 - RNA, 21 nt, Artificial Sequence
  Synthetic
ucaccccaagggggagcaugc

SEQ ID NO: 8748 - RNA, 21 nt, Artificial Sequence
  Synthetic
ucugaacugcaugcucccccu

SEQ ID NO: 8749 - RNA, 21 nt, Artificial Sequence
  Synthetic
ucuguuucaccccaaggggga

SEQ ID NO: 8750 - RNA, 21 nt, Artificial Sequence
  Synthetic
ugaacugcaugcucccccuug

SEQ ID NO: 8751 - RNA, 21 nt, Artificial Sequence
  Synthetic
ugagcaaaucugaacugcaug

SEQ ID NO: 8752 - RNA, 21 nt, Artificial Sequence
  Synthetic
ugcaugcucccccuuggggug

SEQ ID NO: 8753 - RNA, 21 nt, Artificial Sequence
  Synthetic
ugcucccccuuggggugaaac

SEQ ID NO: 8754 - RNA, 21 nt, Artificial Sequence
  Synthetic
uguuucaccccaagggggagc

SEQ ID NO: 8755 - RNA, 21 nt, Artificial Sequence
  Synthetic
uucaccccaagggggagcaug

SEQ ID NO: 8756 - RNA, 21 nt, Artificial Sequence
  Synthetic
uuucaccccaagggggagcau

SEQ ID NO: 8757 - RNA, 22 nt, Artificial Sequence
  Synthetic
aaaucugaacugcaugcucccc

SEQ ID NO: 8758 - RNA, 22 nt, Artificial Sequence
  Synthetic
aacugcaugcucccccuugggg

SEQ ID NO: 8759 - RNA, 22 nt, Artificial Sequence
  Synthetic
aagggggagcaugcaguucaga

SEQ ID NO: 8760 - RNA, 22 nt, Artificial Sequence
  Synthetic
aaucugaacugcaugcuccccc

SEQ ID NO: 8761 - RNA, 22 nt, Artificial Sequence
  Synthetic
acaucuguuucaccccaagggg

SEQ ID NO: 8762 - RNA, 22 nt, Artificial Sequence
  Synthetic
accccaagggggagcaugcagu

SEQ ID NO: 8763 - RNA, 22 nt, Artificial Sequence
  Synthetic
acugcaugcucccccuuggggu

SEQ ID NO: 8764 - RNA, 22 nt, Artificial Sequence
  Synthetic
agcaaaucugaacugcaugcuc

SEQ ID NO: 8765 - RNA, 22 nt, Artificial Sequence
  Synthetic
agcaugcaguucagauuugcuc

SEQ ID NO: 8766 - RNA, 22 nt, Artificial Sequence
  Synthetic
agggggagcaugcaguucagau

SEQ ID NO: 8767 - RNA, 22 nt, Artificial Sequence
  Synthetic
aucugaacugcaugcucccccu

SEQ ID NO: 8768 - RNA, 22 nt, Artificial Sequence
  Synthetic
aucuguuucaccccaaggggga

SEQ ID NO: 8769 - RNA, 22 nt, Artificial Sequence
  Synthetic
augcucccccuuggggugaaac

SEQ ID NO: 8770 - RNA, 22 nt, Artificial Sequence
  Synthetic
caaaucugaacugcaugcuccc

SEQ ID NO: 8771 - RNA, 22 nt, Artificial Sequence
  Synthetic
caagggggagcaugcaguucag

SEQ ID NO: 8772 - RNA, 22 nt, Artificial Sequence
  Synthetic
cacaucuguuucaccccaaggg

SEQ ID NO: 8773 - RNA, 22 nt, Artificial Sequence
  Synthetic
caccccaagggggagcaugcag

SEQ ID NO: 8774 - RNA, 22 nt, Artificial Sequence
  Synthetic
caucuguuucaccccaaggggg

SEQ ID NO: 8775 - RNA, 22 nt, Artificial Sequence
  Synthetic
caugcucccccuuggggugaaa

SEQ ID NO: 8776 - RNA, 22 nt, Artificial Sequence
  Synthetic
ccaagggggagcaugcaguuca

SEQ ID NO: 8777 - RNA, 22 nt, Artificial Sequence
  Synthetic
cccaagggggagcaugcaguuc

SEQ ID NO: 8778 - RNA, 22 nt, Artificial Sequence
  Synthetic
ccccaagggggagcaugcaguu

SEQ ID NO: 8779 - RNA, 22 nt, Artificial Sequence
  Synthetic
cugaacugcaugcucccccuug

SEQ ID NO: 8780 - RNA, 22 nt, Artificial Sequence
  Synthetic
cugcaugcucccccuuggggug

SEQ ID NO: 8781 - RNA, 22 nt, Artificial Sequence
  Synthetic
cuguuucaccccaagggggagc

SEQ ID NO: 8782 - RNA, 22 nt, Artificial Sequence
  Synthetic
gaacugcaugcucccccuuggg

SEQ ID NO: 8783 - RNA, 22 nt, Artificial Sequence
  Synthetic
gagcaaaucugaacugcaugcu

SEQ ID NO: 8784 - RNA, 22 nt, Artificial Sequence
  Synthetic
gagcaugcaguucagauuugcu

SEQ ID NO: 8785 - RNA, 22 nt, Artificial Sequence
  Synthetic
gcaaaucugaacugcaugcucc

SEQ ID NO: 8786 - RNA, 22 nt, Artificial Sequence
  Synthetic
gcaugcucccccuuggggugaa

SEQ ID NO: 8787 - RNA, 22 nt, Artificial Sequence
  Synthetic
gcucccccuuggggugaaacag

SEQ ID NO: 8788 - RNA, 22 nt, Artificial Sequence
  Synthetic
ggagcaugcaguucagauuugc

SEQ ID NO: 8789 - RNA, 22 nt, Artificial Sequence
  Synthetic
gggagcaugcaguucagauuug

SEQ ID NO: 8790 - RNA, 22 nt, Artificial Sequence
  Synthetic
ggggagcaugcaguucagauuu

SEQ ID NO: 8791 - RNA, 22 nt, Artificial Sequence
  Synthetic
gggggagcaugcaguucagauu

SEQ ID NO: 8792 - RNA, 22 nt, Artificial Sequence
  Synthetic
gggugagcaaaucugaacugca

SEQ ID NO: 8793 - RNA, 22 nt, Artificial Sequence
  Synthetic
ggugagcaaaucugaacugcau

SEQ ID NO: 8794 - RNA, 22 nt, Artificial Sequence
  Synthetic
gugagcaaaucugaacugcaug

SEQ ID NO: 8795 - RNA, 22 nt, Artificial Sequence
  Synthetic
guuucaccccaagggggagcau

SEQ ID NO: 8796 - RNA, 22 nt, Artificial Sequence
  Synthetic
ucaccccaagggggagcaugca

SEQ ID NO: 8797 - RNA, 22 nt, Artificial Sequence
  Synthetic
ucugaacugcaugcucccccuu

SEQ ID NO: 8798 - RNA, 22 nt, Artificial Sequence
  Synthetic
ucuguuucaccccaagggggag

SEQ ID NO: 8799 - RNA, 22 nt, Artificial Sequence
  Synthetic
ugaacugcaugcucccccuugg

SEQ ID NO: 8800 - RNA, 22 nt, Artificial Sequence
  Synthetic
ugagcaaaucugaacugcaugc

SEQ ID NO: 8801 - RNA, 22 nt, Artificial Sequence
  Synthetic
ugcaugcucccccuugggguga

SEQ ID NO: 8802 - RNA, 22 nt, Artificial Sequence
  Synthetic
ugcucccccuuggggugaaaca

SEQ ID NO: 8803 - RNA, 22 nt, Artificial Sequence
  Synthetic
ugggugagcaaaucugaacugc

SEQ ID NO: 8804 - RNA, 22 nt, Artificial Sequence
  Synthetic
uguuucaccccaagggggagca

SEQ ID NO: 8805 - RNA, 22 nt, Artificial Sequence
  Synthetic
uucaccccaagggggagcaugc

SEQ ID NO: 8806 - RNA, 22 nt, Artificial Sequence
  Synthetic
uuucaccccaagggggagcaug

SEQ ID NO: 8807 - RNA, 20 nt, Artificial Sequence
  Synthetic
aaacagauguggcagugagg

SEQ ID NO: 8808 - RNA, 20 nt, Artificial Sequence
  Synthetic
aacagauguggcagugaggc

SEQ ID NO: 8809 - RNA, 20 nt, Artificial Sequence
  Synthetic
aaugucaccuacagccucac

SEQ ID NO: 8810 - RNA, 20 nt, Artificial Sequence
  Synthetic
acagauguggcagugaggcu

SEQ ID NO: 8811 - RNA, 20 nt, Artificial Sequence
  Synthetic
acagccucacugccacaucu

SEQ ID NO: 8812 - RNA, 20 nt, Artificial Sequence
  Synthetic
accuacagccucacugccac

SEQ ID NO: 8813 - RNA, 20 nt, Artificial Sequence
  Synthetic
agauguggcagugaggcugu

SEQ ID NO: 8814 - RNA, 20 nt, Artificial Sequence
  Synthetic
agccucacugccacaucugu

SEQ ID NO: 8815 - RNA, 20 nt, Artificial Sequence
  Synthetic
aggaaugucaccuacagccu

SEQ ID NO: 8816 - RNA, 20 nt, Artificial Sequence
  Synthetic
aggcuguaggugacauuccu

SEQ ID NO: 8817 - RNA, 20 nt, Artificial Sequence
  Synthetic
agugaggcuguaggugacau

SEQ ID NO: 8818 - RNA, 20 nt, Artificial Sequence
  Synthetic
augucaccuacagccucacu

SEQ ID NO: 8819 - RNA, 20 nt, Artificial Sequence
  Synthetic
auguggcagugaggcuguag

SEQ ID NO: 8820 - RNA, 20 nt, Artificial Sequence
  Synthetic
caccuacagccucacugcca

SEQ ID NO: 8821 - RNA, 20 nt, Artificial Sequence
  Synthetic
cagauguggcagugaggcug

SEQ ID NO: 8822 - RNA, 20 nt, Artificial Sequence
  Synthetic
cagccucacugccacaucug

SEQ ID NO: 8823 - RNA, 20 nt, Artificial Sequence
  Synthetic
cagugaggcuguaggugaca

SEQ ID NO: 8824 - RNA, 20 nt, Artificial Sequence
  Synthetic
ccuacagccucacugccaca

SEQ ID NO: 8825 - RNA, 20 nt, Artificial Sequence
  Synthetic
cuacagccucacugccacau

SEQ ID NO: 8826 - RNA, 20 nt, Artificial Sequence
  Synthetic
cuggugaggaaugucaccua

SEQ ID NO: 8827 - RNA, 20 nt, Artificial Sequence
  Synthetic
gaaacagauguggcagugag

SEQ ID NO: 8828 - RNA, 20 nt, Artificial Sequence
  Synthetic
gaaugucaccuacagccuca

SEQ ID NO: 8829 - RNA, 20 nt, Artificial Sequence
  Synthetic
gaggaaugucaccuacagcc

SEQ ID NO: 8830 - RNA, 20 nt, Artificial Sequence
  Synthetic
gaggcuguaggugacauucc

SEQ ID NO: 8831 - RNA, 20 nt, Artificial Sequence
  Synthetic
gauguggcagugaggcugua

SEQ ID NO: 8832 - RNA, 20 nt, Artificial Sequence
  Synthetic
gcagugaggcuguaggugac

SEQ ID NO: 8833 - RNA, 20 nt, Artificial Sequence
  Synthetic
gccucacugccacaucuguu

SEQ ID NO: 8834 - RNA, 20 nt, Artificial Sequence
  Synthetic
ggaaugucaccuacagccuc

SEQ ID NO: 8835 - RNA, 20 nt, Artificial Sequence
  Synthetic
ggcagugaggcuguagguga

SEQ ID NO: 8836 - RNA, 20 nt, Artificial Sequence
  Synthetic
ggcuguaggugacauuccuc

SEQ ID NO: 8837 - RNA, 20 nt, Artificial Sequence
  Synthetic
ggugaaacagauguggcagu

SEQ ID NO: 8838 - RNA, 20 nt, Artificial Sequence
  Synthetic
ggugaggaaugucaccuaca

SEQ ID NO: 8839 - RNA, 20 nt, Artificial Sequence
  Synthetic
gucaccuacagccucacugc

SEQ ID NO: 8840 - RNA, 20 nt, Artificial Sequence
  Synthetic
gugaaacagauguggcagug

SEQ ID NO: 8841 - RNA, 20 nt, Artificial Sequence
  Synthetic
gugaggaaugucaccuacag

SEQ ID NO: 8842 - RNA, 20 nt, Artificial Sequence
  Synthetic
gugaggcuguaggugacauu

SEQ ID NO: 8843 - RNA, 20 nt, Artificial Sequence
  Synthetic
guggcagugaggcuguaggu

SEQ ID NO: 8844 - RNA, 20 nt, Artificial Sequence
  Synthetic
uacagccucacugccacauc

SEQ ID NO: 8845 - RNA, 20 nt, Artificial Sequence
  Synthetic
ucaccuacagccucacugcc

SEQ ID NO: 8846 - RNA, 20 nt, Artificial Sequence
  Synthetic
ugaaacagauguggcaguga

SEQ ID NO: 8847 - RNA, 20 nt, Artificial Sequence
  Synthetic
ugaggaaugucaccuacagc

SEQ ID NO: 8848 - RNA, 20 nt, Artificial Sequence
  Synthetic
ugaggcuguaggugacauuc

SEQ ID NO: 8849 - RNA, 20 nt, Artificial Sequence
  Synthetic
uggcagugaggcuguaggug

SEQ ID NO: 8850 - RNA, 20 nt, Artificial Sequence
  Synthetic
uggugaggaaugucaccuac

SEQ ID NO: 8851 - RNA, 20 nt, Artificial Sequence
  Synthetic
ugucaccuacagccucacug

SEQ ID NO: 8852 - RNA, 20 nt, Artificial Sequence
  Synthetic
uguggcagugaggcuguagg

SEQ ID NO: 8853 - RNA, 21 nt, Artificial Sequence
  Synthetic
aaacagauguggcagugaggc

SEQ ID NO: 8854 - RNA, 21 nt, Artificial Sequence
  Synthetic
aacagauguggcagugaggcu

SEQ ID NO: 8855 - RNA, 21 nt, Artificial Sequence
  Synthetic
aaugucaccuacagccucacu

SEQ ID NO: 8856 - RNA, 21 nt, Artificial Sequence
  Synthetic
acagauguggcagugaggcug

SEQ ID NO: 8857 - RNA, 21 nt, Artificial Sequence
  Synthetic
acagccucacugccacaucug

SEQ ID NO: 8858 - RNA, 21 nt, Artificial Sequence
  Synthetic
accuacagccucacugccaca

SEQ ID NO: 8859 - RNA, 21 nt, Artificial Sequence
  Synthetic
agauguggcagugaggcugua

SEQ ID NO: 8860 - RNA, 21 nt, Artificial Sequence
  Synthetic
agccucacugccacaucuguu

SEQ ID NO: 8861 - RNA, 21 nt, Artificial Sequence
  Synthetic
aggaaugucaccuacagccuc

SEQ ID NO: 8862 - RNA, 21 nt, Artificial Sequence
  Synthetic
aggcuguaggugacauuccuc

SEQ ID NO: 8863 - RNA, 21 nt, Artificial Sequence
  Synthetic
agugaggcuguaggugacauu

SEQ ID NO: 8864 - RNA, 21 nt, Artificial Sequence
  Synthetic
augucaccuacagccucacug

SEQ ID NO: 8865 - RNA, 21 nt, Artificial Sequence
  Synthetic
auguggcagugaggcuguagg

SEQ ID NO: 8866 - RNA, 21 nt, Artificial Sequence
  Synthetic
caccuacagccucacugccac

SEQ ID NO: 8867 - RNA, 21 nt, Artificial Sequence
  Synthetic
cagauguggcagugaggcugu

SEQ ID NO: 8868 - RNA, 21 nt, Artificial Sequence
  Synthetic
cagccucacugccacaucugu

SEQ ID NO: 8869 - RNA, 21 nt, Artificial Sequence
  Synthetic
cagugaggcuguaggugacau

SEQ ID NO: 8870 - RNA, 21 nt, Artificial Sequence
  Synthetic
ccuacagccucacugccacau

SEQ ID NO: 8871 - RNA, 21 nt, Artificial Sequence
  Synthetic
cuacagccucacugccacauc

SEQ ID NO: 8872 - RNA, 21 nt, Artificial Sequence
  Synthetic
cuggugaggaaugucaccuac

SEQ ID NO: 8873 - RNA, 21 nt, Artificial Sequence
  Synthetic
gaaacagauguggcagugagg

SEQ ID NO: 8874 - RNA, 21 nt, Artificial Sequence
  Synthetic
gaaugucaccuacagccucac

SEQ ID NO: 8875 - RNA, 21 nt, Artificial Sequence
  Synthetic
gaggaaugucaccuacagccu

SEQ ID NO: 8876 - RNA, 21 nt, Artificial Sequence
  Synthetic
gaggcuguaggugacauuccu

SEQ ID NO: 8877 - RNA, 21 nt, Artificial Sequence
  Synthetic
gauguggcagugaggcuguag

SEQ ID NO: 8878 - RNA, 21 nt, Artificial Sequence
  Synthetic
gcagugaggcuguaggugaca

SEQ ID NO: 8879 - RNA, 21 nt, Artificial Sequence
  Synthetic
gccucacugccacaucuguuu

SEQ ID NO: 8880 - RNA, 21 nt, Artificial Sequence
  Synthetic
gcuggugaggaaugucaccua

SEQ ID NO: 8881 - RNA, 21 nt, Artificial Sequence
  Synthetic
ggaaugucaccuacagccuca

SEQ ID NO: 8882 - RNA, 21 nt, Artificial Sequence
  Synthetic
ggcagugaggcuguaggugac

SEQ ID NO: 8883 - RNA, 21 nt, Artificial Sequence
  Synthetic
ggcuguaggugacauuccuca

SEQ ID NO: 8884 - RNA, 21 nt, Artificial Sequence
  Synthetic
gggugaaacagauguggcagu

SEQ ID NO: 8885 - RNA, 21 nt, Artificial Sequence
  Synthetic
ggugaaacagauguggcagug

SEQ ID NO: 8886 - RNA, 21 nt, Artificial Sequence
  Synthetic
ggugaggaaugucaccuacag

SEQ ID NO: 8887 - RNA, 21 nt, Artificial Sequence
  Synthetic
gucaccuacagccucacugcc

SEQ ID NO: 8888 - RNA, 21 nt, Artificial Sequence
  Synthetic
gugaaacagauguggcaguga

SEQ ID NO: 8889 - RNA, 21 nt, Artificial Sequence
  Synthetic
gugaggaaugucaccuacagc

SEQ ID NO: 8890 - RNA, 21 nt, Artificial Sequence
  Synthetic
gugaggcuguaggugacauuc

SEQ ID NO: 8891 - RNA, 21 nt, Artificial Sequence
  Synthetic
guggcagugaggcuguaggug

SEQ ID NO: 8892 - RNA, 21 nt, Artificial Sequence
  Synthetic
uacagccucacugccacaucu

SEQ ID NO: 8893 - RNA, 21 nt, Artificial Sequence
  Synthetic
ucaccuacagccucacugcca

SEQ ID NO: 8894 - RNA, 21 nt, Artificial Sequence
  Synthetic
ugaaacagauguggcagugag

SEQ ID NO: 8895 - RNA, 21 nt, Artificial Sequence
  Synthetic
ugaggaaugucaccuacagcc

SEQ ID NO: 8896 - RNA, 21 nt, Artificial Sequence
  Synthetic
ugaggcuguaggugacauucc

SEQ ID NO: 8897 - RNA, 21 nt, Artificial Sequence
  Synthetic
uggcagugaggcuguagguga

SEQ ID NO: 8898 - RNA, 21 nt, Artificial Sequence
  Synthetic
uggugaggaaugucaccuaca

SEQ ID NO: 8899 - RNA, 21 nt, Artificial Sequence
  Synthetic
ugucaccuacagccucacugc

SEQ ID NO: 8900 - RNA, 21 nt, Artificial Sequence
  Synthetic
uguggcagugaggcuguaggu

SEQ ID NO: 8901 - RNA, 22 nt, Artificial Sequence
  Synthetic
aaacagauguggcagugaggcu

SEQ ID NO: 8902 - RNA, 22 nt, Artificial Sequence
  Synthetic
aacagauguggcagugaggcug

SEQ ID NO: 8903 - RNA, 22 nt, Artificial Sequence
  Synthetic
aaugucaccuacagccucacug

SEQ ID NO: 8904 - RNA, 22 nt, Artificial Sequence
  Synthetic
acagauguggcagugaggcugu

SEQ ID NO: 8905 - RNA, 22 nt, Artificial Sequence
  Synthetic
acagccucacugccacaucugu

SEQ ID NO: 8906 - RNA, 22 nt, Artificial Sequence
  Synthetic
accuacagccucacugccacau

SEQ ID NO: 8907 - RNA, 22 nt, Artificial Sequence
  Synthetic
agauguggcagugaggcuguag

SEQ ID NO: 8908 - RNA, 22 nt, Artificial Sequence
  Synthetic
agccucacugccacaucuguuu

SEQ ID NO: 8909 - RNA, 22 nt, Artificial Sequence
  Synthetic
aggaaugucaccuacagccuca

SEQ ID NO: 8910 - RNA, 22 nt, Artificial Sequence
  Synthetic
aggcuguaggugacauuccuca

SEQ ID NO: 8911 - RNA, 22 nt, Artificial Sequence
  Synthetic
agugaggcuguaggugacauuc

SEQ ID NO: 8912 - RNA, 22 nt, Artificial Sequence
  Synthetic
augucaccuacagccucacugc

SEQ ID NO: 8913 - RNA, 22 nt, Artificial Sequence
  Synthetic
auguggcagugaggcuguaggu

SEQ ID NO: 8914 - RNA, 22 nt, Artificial Sequence
  Synthetic
caccuacagccucacugccaca

SEQ ID NO: 8915 - RNA, 22 nt, Artificial Sequence
  Synthetic
cagauguggcagugaggcugua

SEQ ID NO: 8916 - RNA, 22 nt, Artificial Sequence
  Synthetic
cagccucacugccacaucuguu

SEQ ID NO: 8917 - RNA, 22 nt, Artificial Sequence
  Synthetic
cagugaggcuguaggugacauu

SEQ ID NO: 8918 - RNA, 22 nt, Artificial Sequence
  Synthetic
ccuacagccucacugccacauc

SEQ ID NO: 8919 - RNA, 22 nt, Artificial Sequence
  Synthetic
cuacagccucacugccacaucu

SEQ ID NO: 8920 - RNA, 22 nt, Artificial Sequence
  Synthetic
cuggugaggaaugucaccuaca

SEQ ID NO: 8921 - RNA, 22 nt, Artificial Sequence
  Synthetic
gaaacagauguggcagugaggc

SEQ ID NO: 8922 - RNA, 22 nt, Artificial Sequence
  Synthetic
gaaugucaccuacagccucacu

SEQ ID NO: 8923 - RNA, 22 nt, Artificial Sequence
  Synthetic
gaggaaugucaccuacagccuc

SEQ ID NO: 8924 - RNA, 22 nt, Artificial Sequence
  Synthetic
gaggcuguaggugacauuccuc

SEQ ID NO: 8925 - RNA, 22 nt, Artificial Sequence
  Synthetic
gauguggcagugaggcuguagg

SEQ ID NO: 8926 - RNA, 22 nt, Artificial Sequence
  Synthetic
gcagugaggcuguaggugacau

SEQ ID NO: 8927 - RNA, 22 nt, Artificial Sequence
  Synthetic
gccucacugccacaucuguuuc

SEQ ID NO: 8928 - RNA, 22 nt, Artificial Sequence
  Synthetic
gcuggugaggaaugucaccuac

SEQ ID NO: 8929 - RNA, 22 nt, Artificial Sequence
  Synthetic
ggaaugucaccuacagccucac

SEQ ID NO: 8930 - RNA, 22 nt, Artificial Sequence
  Synthetic
ggcagugaggcuguaggugaca

SEQ ID NO: 8931 - RNA, 22 nt, Artificial Sequence
  Synthetic
ggcuggugaggaaugucaccua

SEQ ID NO: 8932 - RNA, 22 nt, Artificial Sequence
  Synthetic
ggcuguaggugacauuccucac

SEQ ID NO: 8933 - RNA, 22 nt, Artificial Sequence
  Synthetic
ggggugaaacagauguggcagu

SEQ ID NO: 8934 - RNA, 22 nt, Artificial Sequence
  Synthetic
gggugaaacagauguggcagug

SEQ ID NO: 8935 - RNA, 22 nt, Artificial Sequence
  Synthetic
ggugaaacagauguggcaguga

SEQ ID NO: 8936 - RNA, 22 nt, Artificial Sequence
  Synthetic
ggugaggaaugucaccuacagc

SEQ ID NO: 8937 - RNA, 22 nt, Artificial Sequence
  Synthetic
gucaccuacagccucacugcca

SEQ ID NO: 8938 - RNA, 22 nt, Artificial Sequence
  Synthetic
gugaaacagauguggcagugag

SEQ ID NO: 8939 - RNA, 22 nt, Artificial Sequence
  Synthetic
gugaggaaugucaccuacagcc

SEQ ID NO: 8940 - RNA, 22 nt, Artificial Sequence
  Synthetic
gugaggcuguaggugacauucc

SEQ ID NO: 8941 - RNA, 22 nt, Artificial Sequence
  Synthetic
guggcagugaggcuguagguga

SEQ ID NO: 8942 - RNA, 22 nt, Artificial Sequence
  Synthetic
uacagccucacugccacaucug

SEQ ID NO: 8943 - RNA, 22 nt, Artificial Sequence
  Synthetic
ucaccuacagccucacugccac

SEQ ID NO: 8944 - RNA, 22 nt, Artificial Sequence
  Synthetic
ugaaacagauguggcagugagg

SEQ ID NO: 8945 - RNA, 22 nt, Artificial Sequence
  Synthetic
ugaggaaugucaccuacagccu

SEQ ID NO: 8946 - RNA, 22 nt, Artificial Sequence
  Synthetic
ugaggcuguaggugacauuccu

SEQ ID NO: 8947 - RNA, 22 nt, Artificial Sequence
  Synthetic
uggcagugaggcuguaggugac

SEQ ID NO: 8948 - RNA, 22 nt, Artificial Sequence
  Synthetic
uggugaggaaugucaccuacag

SEQ ID NO: 8949 - RNA, 22 nt, Artificial Sequence
  Synthetic
ugucaccuacagccucacugcc

SEQ ID NO: 8950 - RNA, 22 nt, Artificial Sequence
  Synthetic
uguggcagugaggcuguaggug

SEQ ID NO: 8951 - RNA, 20 nt, Artificial Sequence
  Synthetic
aaugucacccacaggccuca

SEQ ID NO: 8952 - RNA, 20 nt, Artificial Sequence
  Synthetic
acagauguggcagugaggcc

SEQ ID NO: 8953 - RNA, 20 nt, Artificial Sequence
  Synthetic
acccacaggccucacugcca

SEQ ID NO: 8954 - RNA, 20 nt, Artificial Sequence
  Synthetic
acuggcuggugaggaauguc

SEQ ID NO: 8955 - RNA, 20 nt, Artificial Sequence
  Synthetic
agauguggcagugaggccug

SEQ ID NO: 8956 - RNA, 20 nt, Artificial Sequence
  Synthetic
aggaaugucacccacaggcc

SEQ ID NO: 8957 - RNA, 20 nt, Artificial Sequence
  Synthetic
aggccugugggugacauucc

SEQ ID NO: 8958 - RNA, 20 nt, Artificial Sequence
  Synthetic
agugaggccugugggugaca

SEQ ID NO: 8959 - RNA, 20 nt, Artificial Sequence
  Synthetic
augucacccacaggccucac

SEQ ID NO: 8960 - RNA, 20 nt, Artificial Sequence
  Synthetic
auguggcagugaggccugug

SEQ ID NO: 8961 - RNA, 20 nt, Artificial Sequence
  Synthetic
cacccacaggccucacugcc

SEQ ID NO: 8962 - RNA, 20 nt, Artificial Sequence
  Synthetic
cagauguggcagugaggccu

SEQ ID NO: 8963 - RNA, 20 nt, Artificial Sequence
  Synthetic
cagugaggccugugggugac

SEQ ID NO: 8964 - RNA, 20 nt, Artificial Sequence
  Synthetic
ccacaggccucacugccaca

SEQ ID NO: 8965 - RNA, 20 nt, Artificial Sequence
  Synthetic
cccacaggccucacugccac

SEQ ID NO: 8966 - RNA, 20 nt, Artificial Sequence
  Synthetic
ccugugggugacauuccuca

SEQ ID NO: 8967 - RNA, 20 nt, Artificial Sequence
  Synthetic
cuggcuggugaggaauguca

SEQ ID NO: 8968 - RNA, 20 nt, Artificial Sequence
  Synthetic
cuggugaggaaugucaccca

SEQ ID NO: 8969 - RNA, 20 nt, Artificial Sequence
  Synthetic
cugugggugacauuccucac

SEQ ID NO: 8970 - RNA, 20 nt, Artificial Sequence
  Synthetic
gaaugucacccacaggccuc

SEQ ID NO: 8971 - RNA, 20 nt, Artificial Sequence
  Synthetic
gaggaaugucacccacaggc

SEQ ID NO: 8972 - RNA, 20 nt, Artificial Sequence
  Synthetic
gaggccugugggugacauuc

SEQ ID NO: 8973 - RNA, 20 nt, Artificial Sequence
  Synthetic
gauguggcagugaggccugu

SEQ ID NO: 8974 - RNA, 20 nt, Artificial Sequence
  Synthetic
gcagugaggccuguggguga

SEQ ID NO: 8975 - RNA, 20 nt, Artificial Sequence
  Synthetic
gccugugggugacauuccuc

SEQ ID NO: 8976 - RNA, 20 nt, Artificial Sequence
  Synthetic
gcuggugaggaaugucaccc

SEQ ID NO: 8977 - RNA, 20 nt, Artificial Sequence
  Synthetic
ggaaugucacccacaggccu

SEQ ID NO: 8978 - RNA, 20 nt, Artificial Sequence
  Synthetic
ggcagugaggccugugggug

SEQ ID NO: 8979 - RNA, 20 nt, Artificial Sequence
  Synthetic
ggccugugggugacauuccu

SEQ ID NO: 8980 - RNA, 20 nt, Artificial Sequence
  Synthetic
ggcuggugaggaaugucacc

SEQ ID NO: 8981 - RNA, 20 nt, Artificial Sequence
  Synthetic
ggugaggaaugucacccaca

SEQ ID NO: 8982 - RNA, 20 nt, Artificial Sequence
  Synthetic
gucacccacaggccucacug

SEQ ID NO: 8983 - RNA, 20 nt, Artificial Sequence
  Synthetic
gugaggaaugucacccacag

SEQ ID NO: 8984 - RNA, 20 nt, Artificial Sequence
  Synthetic
gugaggccugugggugacau

SEQ ID NO: 8985 - RNA, 20 nt, Artificial Sequence
  Synthetic
guggcagugaggccuguggg

SEQ ID NO: 8986 - RNA, 20 nt, Artificial Sequence
  Synthetic
gugggugacauuccucacca

SEQ ID NO: 8987 - RNA, 20 nt, Artificial Sequence
  Synthetic
ucacccacaggccucacugc

SEQ ID NO: 8988 - RNA, 20 nt, Artificial Sequence
  Synthetic
ugaggaaugucacccacagg

SEQ ID NO: 8989 - RNA, 20 nt, Artificial Sequence
  Synthetic
ugaggccugugggugacauu

SEQ ID NO: 8990 - RNA, 20 nt, Artificial Sequence
  Synthetic
uggcagugaggccugugggu

SEQ ID NO: 8991 - RNA, 20 nt, Artificial Sequence
  Synthetic
uggcuggugaggaaugucac

SEQ ID NO: 8992 - RNA, 20 nt, Artificial Sequence
  Synthetic
ugggugacauuccucaccag

SEQ ID NO: 8993 - RNA, 20 nt, Artificial Sequence
  Synthetic
uggugaggaaugucacccac

SEQ ID NO: 8994 - RNA, 20 nt, Artificial Sequence
  Synthetic
ugucacccacaggccucacu

SEQ ID NO: 8995 - RNA, 20 nt, Artificial Sequence
  Synthetic
uguggcagugaggccugugg

SEQ ID NO: 8996 - RNA, 20 nt, Artificial Sequence
  Synthetic
ugugggugacauuccucacc

SEQ ID NO: 8997 - RNA, 21 nt, Artificial Sequence
  Synthetic
aacagauguggcagugaggcc

SEQ ID NO: 8998 - RNA, 21 nt, Artificial Sequence
  Synthetic
aaugucacccacaggccucac

SEQ ID NO: 8999 - RNA, 21 nt, Artificial Sequence
  Synthetic
acagauguggcagugaggccu

SEQ ID NO: 9000 - RNA, 21 nt, Artificial Sequence
  Synthetic
acccacaggccucacugccac

SEQ ID NO: 9001 - RNA, 21 nt, Artificial Sequence
  Synthetic
acuggcuggugaggaauguca

SEQ ID NO: 9002 - RNA, 21 nt, Artificial Sequence
  Synthetic
agauguggcagugaggccugu

SEQ ID NO: 9003 - RNA, 21 nt, Artificial Sequence
  Synthetic
aggaaugucacccacaggccu

SEQ ID NO: 9004 - RNA, 21 nt, Artificial Sequence
  Synthetic
aggccugugggugacauuccu

SEQ ID NO: 9005 - RNA, 21 nt, Artificial Sequence
  Synthetic
agugaggccugugggugacau

SEQ ID NO: 9006 - RNA, 21 nt, Artificial Sequence
  Synthetic
augucacccacaggccucacu

SEQ ID NO: 9007 - RNA, 21 nt, Artificial Sequence
  Synthetic
auguggcagugaggccugugg

SEQ ID NO: 9008 - RNA, 21 nt, Artificial Sequence
  Synthetic
cacccacaggccucacugcca

SEQ ID NO: 9009 - RNA, 21 nt, Artificial Sequence
  Synthetic
cagauguggcagugaggccug

SEQ ID NO: 9010 - RNA, 21 nt, Artificial Sequence
  Synthetic
cagugaggccugugggugaca

SEQ ID NO: 9011 - RNA, 21 nt, Artificial Sequence
  Synthetic
ccacaggccucacugccacau

SEQ ID NO: 9012 - RNA, 21 nt, Artificial Sequence
  Synthetic
cccacaggccucacugccaca

SEQ ID NO: 9013 - RNA, 21 nt, Artificial Sequence
  Synthetic
ccugugggugacauuccucac

SEQ ID NO: 9014 - RNA, 21 nt, Artificial Sequence
  Synthetic
cuggcuggugaggaaugucac

SEQ ID NO: 9015 - RNA, 21 nt, Artificial Sequence
  Synthetic
cuggugaggaaugucacccac

SEQ ID NO: 9016 - RNA, 21 nt, Artificial Sequence
  Synthetic
cugugggugacauuccucacc

SEQ ID NO: 9017 - RNA, 21 nt, Artificial Sequence
  Synthetic
gaaugucacccacaggccuca

SEQ ID NO: 9018 - RNA, 21 nt, Artificial Sequence
  Synthetic
gacuggcuggugaggaauguc

SEQ ID NO: 9019 - RNA, 21 nt, Artificial Sequence
  Synthetic
gaggaaugucacccacaggcc

SEQ ID NO: 9020 - RNA, 21 nt, Artificial Sequence
  Synthetic
gaggccugugggugacauucc

SEQ ID NO: 9021 - RNA, 21 nt, Artificial Sequence
  Synthetic
gauguggcagugaggccugug

SEQ ID NO: 9022 - RNA, 21 nt, Artificial Sequence
  Synthetic
gcagugaggccugugggugac

SEQ ID NO: 9023 - RNA, 21 nt, Artificial Sequence
  Synthetic
gccugugggugacauuccuca

SEQ ID NO: 9024 - RNA, 21 nt, Artificial Sequence
  Synthetic
gcuggugaggaaugucaccca

SEQ ID NO: 9025 - RNA, 21 nt, Artificial Sequence
  Synthetic
ggaaugucacccacaggccuc

SEQ ID NO: 9026 - RNA, 21 nt, Artificial Sequence
  Synthetic
ggcagugaggccuguggguga

SEQ ID NO: 9027 - RNA, 21 nt, Artificial Sequence
  Synthetic
ggccugugggugacauuccuc

SEQ ID NO: 9028 - RNA, 21 nt, Artificial Sequence
  Synthetic
ggcuggugaggaaugucaccc

SEQ ID NO: 9029 - RNA, 21 nt, Artificial Sequence
  Synthetic
ggugaggaaugucacccacag

SEQ ID NO: 9030 - RNA, 21 nt, Artificial Sequence
  Synthetic
gucacccacaggccucacugc

SEQ ID NO: 9031 - RNA, 21 nt, Artificial Sequence
  Synthetic
gugaggaaugucacccacagg

SEQ ID NO: 9032 - RNA, 21 nt, Artificial Sequence
  Synthetic
gugaggccugugggugacauu

SEQ ID NO: 9033 - RNA, 21 nt, Artificial Sequence
  Synthetic
guggcagugaggccugugggu

SEQ ID NO: 9034 - RNA, 21 nt, Artificial Sequence
  Synthetic
gugggugacauuccucaccag

SEQ ID NO: 9035 - RNA, 21 nt, Artificial Sequence
  Synthetic
ucacccacaggccucacugcc

SEQ ID NO: 9036 - RNA, 21 nt, Artificial Sequence
  Synthetic
ugaggaaugucacccacaggc

SEQ ID NO: 9037 - RNA, 21 nt, Artificial Sequence
  Synthetic
ugaggccugugggugacauuc

SEQ ID NO: 9038 - RNA, 21 nt, Artificial Sequence
  Synthetic
uggcagugaggccugugggug

SEQ ID NO: 9039 - RNA, 21 nt, Artificial Sequence
  Synthetic
uggcuggugaggaaugucacc

SEQ ID NO: 9040 - RNA, 21 nt, Artificial Sequence
  Synthetic
ugggugacauuccucaccagc

SEQ ID NO: 9041 - RNA, 21 nt, Artificial Sequence
  Synthetic
uggugaggaaugucacccaca

SEQ ID NO: 9042 - RNA, 21 nt, Artificial Sequence
  Synthetic
ugucacccacaggccucacug

SEQ ID NO: 9043 - RNA, 21 nt, Artificial Sequence
  Synthetic
uguggcagugaggccuguggg

SEQ ID NO: 9044 - RNA, 21 nt, Artificial Sequence
  Synthetic
ugugggugacauuccucacca

SEQ ID NO: 9045 - RNA, 22 nt, Artificial Sequence
  Synthetic
aaacagauguggcagugaggcc

SEQ ID NO: 9046 - RNA, 22 nt, Artificial Sequence
  Synthetic
aacagauguggcagugaggccu

SEQ ID NO: 9047 - RNA, 22 nt, Artificial Sequence
  Synthetic
aaugucacccacaggccucacu

SEQ ID NO: 9048 - RNA, 22 nt, Artificial Sequence
  Synthetic
acagauguggcagugaggccug

SEQ ID NO: 9049 - RNA, 22 nt, Artificial Sequence
  Synthetic
acccacaggccucacugccaca

SEQ ID NO: 9050 - RNA, 22 nt, Artificial Sequence
  Synthetic
acuggcuggugaggaaugucac

SEQ ID NO: 9051 - RNA, 22 nt, Artificial Sequence
  Synthetic
agauguggcagugaggccugug

SEQ ID NO: 9052 - RNA, 22 nt, Artificial Sequence
  Synthetic
aggaaugucacccacaggccuc

SEQ ID NO: 9053 - RNA, 22 nt, Artificial Sequence
  Synthetic
aggccugugggugacauuccuc

SEQ ID NO: 9054 - RNA, 22 nt, Artificial Sequence
  Synthetic
agugaggccugugggugacauu

SEQ ID NO: 9055 - RNA, 22 nt, Artificial Sequence
  Synthetic
augucacccacaggccucacug

SEQ ID NO: 9056 - RNA, 22 nt, Artificial Sequence
  Synthetic
auguggcagugaggccuguggg

SEQ ID NO: 9057 - RNA, 22 nt, Artificial Sequence
  Synthetic
cacccacaggccucacugccac

SEQ ID NO: 9058 - RNA, 22 nt, Artificial Sequence
  Synthetic
cagauguggcagugaggccugu

SEQ ID NO: 9059 - RNA, 22 nt, Artificial Sequence
  Synthetic
cagugaggccugugggugacau

SEQ ID NO: 9060 - RNA, 22 nt, Artificial Sequence
  Synthetic
ccacaggccucacugccacauc

SEQ ID NO: 9061 - RNA, 22 nt, Artificial Sequence
  Synthetic
cccacaggccucacugccacau

SEQ ID NO: 9062 - RNA, 22 nt, Artificial Sequence
  Synthetic
ccugugggugacauuccucacc

SEQ ID NO: 9063 - RNA, 22 nt, Artificial Sequence
  Synthetic
cuggcuggugaggaaugucacc

SEQ ID NO: 9064 - RNA, 22 nt, Artificial Sequence
  Synthetic
cuggugaggaaugucacccaca

SEQ ID NO: 9065 - RNA, 22 nt, Artificial Sequence
  Synthetic
cugugggugacauuccucacca

SEQ ID NO: 9066 - RNA, 22 nt, Artificial Sequence
  Synthetic
gaaugucacccacaggccucac

SEQ ID NO: 9067 - RNA, 22 nt, Artificial Sequence
  Synthetic
gacuggcuggugaggaauguca

SEQ ID NO: 9068 - RNA, 22 nt, Artificial Sequence
  Synthetic
gaggaaugucacccacaggccu

SEQ ID NO: 9069 - RNA, 22 nt, Artificial Sequence
  Synthetic
gaggccugugggugacauuccu

SEQ ID NO: 9070 - RNA, 22 nt, Artificial Sequence
  Synthetic
gauguggcagugaggccugugg

SEQ ID NO: 9071 - RNA, 22 nt, Artificial Sequence
  Synthetic
gcagugaggccugugggugaca

SEQ ID NO: 9072 - RNA, 22 nt, Artificial Sequence
  Synthetic
gccugugggugacauuccucac

SEQ ID NO: 9073 - RNA, 22 nt, Artificial Sequence
  Synthetic
gcuggugaggaaugucacccac

SEQ ID NO: 9074 - RNA, 22 nt, Artificial Sequence
  Synthetic
ggaaugucacccacaggccuca

SEQ ID NO: 9075 - RNA, 22 nt, Artificial Sequence
  Synthetic
ggacuggcuggugaggaauguc

SEQ ID NO: 9076 - RNA, 22 nt, Artificial Sequence
  Synthetic
ggcagugaggccugugggugac

SEQ ID NO: 9077 - RNA, 22 nt, Artificial Sequence
  Synthetic
ggccugugggugacauuccuca

SEQ ID NO: 9078 - RNA, 22 nt, Artificial Sequence
  Synthetic
ggcuggugaggaaugucaccca

SEQ ID NO: 9079 - RNA, 22 nt, Artificial Sequence
  Synthetic
ggugaggaaugucacccacagg

SEQ ID NO: 9080 - RNA, 22 nt, Artificial Sequence
  Synthetic
gucacccacaggccucacugcc

SEQ ID NO: 9081 - RNA, 22 nt, Artificial Sequence
  Synthetic
gugaggaaugucacccacaggc

SEQ ID NO: 9082 - RNA, 22 nt, Artificial Sequence
  Synthetic
gugaggccugugggugacauuc

SEQ ID NO: 9083 - RNA, 22 nt, Artificial Sequence
  Synthetic
guggcagugaggccugugggug

SEQ ID NO: 9084 - RNA, 22 nt, Artificial Sequence
  Synthetic
gugggugacauuccucaccagc

SEQ ID NO: 9085 - RNA, 22 nt, Artificial Sequence
  Synthetic
ucacccacaggccucacugcca

SEQ ID NO: 9086 - RNA, 22 nt, Artificial Sequence
  Synthetic
ugaggaaugucacccacaggcc

SEQ ID NO: 9087 - RNA, 22 nt, Artificial Sequence
  Synthetic
ugaggccugugggugacauucc

SEQ ID NO: 9088 - RNA, 22 nt, Artificial Sequence
  Synthetic
uggcagugaggccuguggguga

SEQ ID NO: 9089 - RNA, 22 nt, Artificial Sequence
  Synthetic
uggcuggugaggaaugucaccc

SEQ ID NO: 9090 - RNA, 22 nt, Artificial Sequence
  Synthetic
ugggugacauuccucaccagcc

SEQ ID NO: 9091 - RNA, 22 nt, Artificial Sequence
  Synthetic
uggugaggaaugucacccacag

SEQ ID NO: 9092 - RNA, 22 nt, Artificial Sequence
  Synthetic
ugucacccacaggccucacugc

SEQ ID NO: 9093 - RNA, 22 nt, Artificial Sequence
  Synthetic
uguggcagugaggccugugggu

SEQ ID NO: 9094 - RNA, 22 nt, Artificial Sequence
  Synthetic
ugugggugacauuccucaccag

SEQ ID NO: 9095 - RNA, 20 nt, Artificial Sequence
  Synthetic
aagaaugucaccuacaggcc

SEQ ID NO: 9096 - RNA, 20 nt, Artificial Sequence
  Synthetic
acauucuucaccagccaguc

SEQ ID NO: 9097 - RNA, 20 nt, Artificial Sequence
  Synthetic
acuauggacuggcuggugaa

SEQ ID NO: 9098 - RNA, 20 nt, Artificial Sequence
  Synthetic
acuggcuggugaagaauguc

SEQ ID NO: 9099 - RNA, 20 nt, Artificial Sequence
  Synthetic
aggccuguaggugacauucu

SEQ ID NO: 9100 - RNA, 20 nt, Artificial Sequence
  Synthetic
aggugacauucuucaccagc

SEQ ID NO: 9101 - RNA, 20 nt, Artificial Sequence
  Synthetic
agugaggccuguaggugaca

SEQ ID NO: 9102 - RNA, 20 nt, Artificial Sequence
  Synthetic
auggacuggcuggugaagaa

SEQ ID NO: 9103 - RNA, 20 nt, Artificial Sequence
  Synthetic
auucuucaccagccagucca

SEQ ID NO: 9104 - RNA, 20 nt, Artificial Sequence
  Synthetic
cauucuucaccagccagucc

SEQ ID NO: 9105 - RNA, 20 nt, Artificial Sequence
  Synthetic
ccuguaggugacauucuuca

SEQ ID NO: 9106 - RNA, 20 nt, Artificial Sequence
  Synthetic
cgugacuauggacuggcugg

SEQ ID NO: 9107 - RNA, 20 nt, Artificial Sequence
  Synthetic
cuauggacuggcuggugaag

SEQ ID NO: 9108 - RNA, 20 nt, Artificial Sequence
  Synthetic
cuggcuggugaagaauguca

SEQ ID NO: 9109 - RNA, 20 nt, Artificial Sequence
  Synthetic
cuggugaagaaugucaccua

SEQ ID NO: 9110 - RNA, 20 nt, Artificial Sequence
  Synthetic
cuguaggugacauucuucac

SEQ ID NO: 9111 - RNA, 20 nt, Artificial Sequence
  Synthetic
cuucaccagccaguccauag

SEQ ID NO: 9112 - RNA, 20 nt, Artificial Sequence
  Synthetic
gaagaaugucaccuacaggc

SEQ ID NO: 9113 - RNA, 20 nt, Artificial Sequence
  Synthetic
gacauucuucaccagccagu

SEQ ID NO: 9114 - RNA, 20 nt, Artificial Sequence
  Synthetic
gacuauggacuggcugguga

SEQ ID NO: 9115 - RNA, 20 nt, Artificial Sequence
  Synthetic
gacuggcuggugaagaaugu

SEQ ID NO: 9116 - RNA, 20 nt, Artificial Sequence
  Synthetic
gaggccuguaggugacauuc

SEQ ID NO: 9117 - RNA, 20 nt, Artificial Sequence
  Synthetic
gccuguaggugacauucuuc

SEQ ID NO: 9118 - RNA, 20 nt, Artificial Sequence
  Synthetic
gcuggugaagaaugucaccu

SEQ ID NO: 9119 - RNA, 20 nt, Artificial Sequence
  Synthetic
ggacuggcuggugaagaaug

SEQ ID NO: 9120 - RNA, 20 nt, Artificial Sequence
  Synthetic
ggccuguaggugacauucuu

SEQ ID NO: 9121 - RNA, 20 nt, Artificial Sequence
  Synthetic
ggcuggugaagaaugucacc

SEQ ID NO: 9122 - RNA, 20 nt, Artificial Sequence
  Synthetic
ggugaagaaugucaccuaca

SEQ ID NO: 9123 - RNA, 20 nt, Artificial Sequence
  Synthetic
ggugacauucuucaccagcc

SEQ ID NO: 9124 - RNA, 20 nt, Artificial Sequence
  Synthetic
guaggugacauucuucacca

SEQ ID NO: 9125 - RNA, 20 nt, Artificial Sequence
  Synthetic
gugaagaaugucaccuacag

SEQ ID NO: 9126 - RNA, 20 nt, Artificial Sequence
  Synthetic
gugacauucuucaccagcca

SEQ ID NO: 9127 - RNA, 20 nt, Artificial Sequence
  Synthetic
gugacuauggacuggcuggu

SEQ ID NO: 9128 - RNA, 20 nt, Artificial Sequence
  Synthetic
gugaggccuguaggugacau

SEQ ID NO: 9129 - RNA, 20 nt, Artificial Sequence
  Synthetic
uaggugacauucuucaccag

SEQ ID NO: 9130 - RNA, 20 nt, Artificial Sequence
  Synthetic
uauggacuggcuggugaaga

SEQ ID NO: 9131 - RNA, 20 nt, Artificial Sequence
  Synthetic
ucuucaccagccaguccaua

SEQ ID NO: 9132 - RNA, 20 nt, Artificial Sequence
  Synthetic
ugaagaaugucaccuacagg

SEQ ID NO: 9133 - RNA, 20 nt, Artificial Sequence
  Synthetic
ugacauucuucaccagccag

SEQ ID NO: 9134 - RNA, 20 nt, Artificial Sequence
  Synthetic
ugacuauggacuggcuggug

SEQ ID NO: 9135 - RNA, 20 nt, Artificial Sequence
  Synthetic
ugaggccuguaggugacauu

SEQ ID NO: 9136 - RNA, 20 nt, Artificial Sequence
  Synthetic
uggacuggcuggugaagaau

SEQ ID NO: 9137 - RNA, 20 nt, Artificial Sequence
  Synthetic
uggcuggugaagaaugucac

SEQ ID NO: 9138 - RNA, 20 nt, Artificial Sequence
  Synthetic
uggugaagaaugucaccuac

SEQ ID NO: 9139 - RNA, 20 nt, Artificial Sequence
  Synthetic
uguaggugacauucuucacc

SEQ ID NO: 9140 - RNA, 20 nt, Artificial Sequence
  Synthetic
uucuucaccagccaguccau

SEQ ID NO: 9141 - RNA, 21 nt, Artificial Sequence
  Synthetic
aagaaugucaccuacaggccu

SEQ ID NO: 9142 - RNA, 21 nt, Artificial Sequence
  Synthetic
acauucuucaccagccagucc

SEQ ID NO: 9143 - RNA, 21 nt, Artificial Sequence
  Synthetic
acuauggacuggcuggugaag

SEQ ID NO: 9144 - RNA, 21 nt, Artificial Sequence
  Synthetic
acuggcuggugaagaauguca

SEQ ID NO: 9145 - RNA, 21 nt, Artificial Sequence
  Synthetic
aggccuguaggugacauucuu

SEQ ID NO: 9146 - RNA, 21 nt, Artificial Sequence
  Synthetic
aggugacauucuucaccagcc

SEQ ID NO: 9147 - RNA, 21 nt, Artificial Sequence
  Synthetic
agugaggccuguaggugacau

SEQ ID NO: 9148 - RNA, 21 nt, Artificial Sequence
  Synthetic
auggacuggcuggugaagaau

SEQ ID NO: 9149 - RNA, 21 nt, Artificial Sequence
  Synthetic
auucuucaccagccaguccau

SEQ ID NO: 9150 - RNA, 21 nt, Artificial Sequence
  Synthetic
cagugaggccuguaggugaca

SEQ ID NO: 9151 - RNA, 21 nt, Artificial Sequence
  Synthetic
cauucuucaccagccagucca

SEQ ID NO: 9152 - RNA, 21 nt, Artificial Sequence
  Synthetic
ccuguaggugacauucuucac

SEQ ID NO: 9153 - RNA, 21 nt, Artificial Sequence
  Synthetic
cgugacuauggacuggcuggu

SEQ ID NO: 9154 - RNA, 21 nt, Artificial Sequence
  Synthetic
cuauggacuggcuggugaaga

SEQ ID NO: 9155 - RNA, 21 nt, Artificial Sequence
  Synthetic
cuggcuggugaagaaugucac

SEQ ID NO: 9156 - RNA, 21 nt, Artificial Sequence
  Synthetic
cuggugaagaaugucaccuac

SEQ ID NO: 9157 - RNA, 21 nt, Artificial Sequence
  Synthetic
cuguaggugacauucuucacc

SEQ ID NO: 9158 - RNA, 21 nt, Artificial Sequence
  Synthetic
cuucaccagccaguccauagu

SEQ ID NO: 9159 - RNA, 21 nt, Artificial Sequence
  Synthetic
gaagaaugucaccuacaggcc

SEQ ID NO: 9160 - RNA, 21 nt, Artificial Sequence
  Synthetic
gacauucuucaccagccaguc

SEQ ID NO: 9161 - RNA, 21 nt, Artificial Sequence
  Synthetic
gacuauggacuggcuggugaa

SEQ ID NO: 9162 - RNA, 21 nt, Artificial Sequence
  Synthetic
gacuggcuggugaagaauguc

SEQ ID NO: 9163 - RNA, 21 nt, Artificial Sequence
  Synthetic
gaggccuguaggugacauucu

SEQ ID NO: 9164 - RNA, 21 nt, Artificial Sequence
  Synthetic
gccuguaggugacauucuuca

SEQ ID NO: 9165 - RNA, 21 nt, Artificial Sequence
  Synthetic
gcuggugaagaaugucaccua

SEQ ID NO: 9166 - RNA, 21 nt, Artificial Sequence
  Synthetic
ggacuggcuggugaagaaugu

SEQ ID NO: 9167 - RNA, 21 nt, Artificial Sequence
  Synthetic
ggccuguaggugacauucuuc

SEQ ID NO: 9168 - RNA, 21 nt, Artificial Sequence
  Synthetic
ggcuggugaagaaugucaccu

SEQ ID NO: 9169 - RNA, 21 nt, Artificial Sequence
  Synthetic
ggugaagaaugucaccuacag

SEQ ID NO: 9170 - RNA, 21 nt, Artificial Sequence
  Synthetic
ggugacauucuucaccagcca

SEQ ID NO: 9171 - RNA, 21 nt, Artificial Sequence
  Synthetic
guaggugacauucuucaccag

SEQ ID NO: 9172 - RNA, 21 nt, Artificial Sequence
  Synthetic
gugaagaaugucaccuacagg

SEQ ID NO: 9173 - RNA, 21 nt, Artificial Sequence
  Synthetic
gugacauucuucaccagccag

SEQ ID NO: 9174 - RNA, 21 nt, Artificial Sequence
  Synthetic
gugacuauggacuggcuggug

SEQ ID NO: 9175 - RNA, 21 nt, Artificial Sequence
  Synthetic
gugaggccuguaggugacauu

SEQ ID NO: 9176 - RNA, 21 nt, Artificial Sequence
  Synthetic
uaggugacauucuucaccagc

SEQ ID NO: 9177 - RNA, 21 nt, Artificial Sequence
  Synthetic
uauggacuggcuggugaagaa

SEQ ID NO: 9178 - RNA, 21 nt, Artificial Sequence
  Synthetic
ucgugacuauggacuggcugg

SEQ ID NO: 9179 - RNA, 21 nt, Artificial Sequence
  Synthetic
ucuucaccagccaguccauag

SEQ ID NO: 9180 - RNA, 21 nt, Artificial Sequence
  Synthetic
ugaagaaugucaccuacaggc

SEQ ID NO: 9181 - RNA, 21 nt, Artificial Sequence
  Synthetic
ugacauucuucaccagccagu

SEQ ID NO: 9182 - RNA, 21 nt, Artificial Sequence
  Synthetic
ugacuauggacuggcugguga

SEQ ID NO: 9183 - RNA, 21 nt, Artificial Sequence
  Synthetic
ugaggccuguaggugacauuc

SEQ ID NO: 9184 - RNA, 21 nt, Artificial Sequence
  Synthetic
uggacuggcuggugaagaaug

SEQ ID NO: 9185 - RNA, 21 nt, Artificial Sequence
  Synthetic
uggcuggugaagaaugucacc

SEQ ID NO: 9186 - RNA, 21 nt, Artificial Sequence
  Synthetic
uggugaagaaugucaccuaca

SEQ ID NO: 9187 - RNA, 21 nt, Artificial Sequence
  Synthetic
uguaggugacauucuucacca

SEQ ID NO: 9188 - RNA, 21 nt, Artificial Sequence
  Synthetic
uucuucaccagccaguccaua

SEQ ID NO: 9189 - RNA, 22 nt, Artificial Sequence
  Synthetic
aagaaugucaccuacaggccuc

SEQ ID NO: 9190 - RNA, 22 nt, Artificial Sequence
  Synthetic
acauucuucaccagccagucca

SEQ ID NO: 9191 - RNA, 22 nt, Artificial Sequence
  Synthetic
acuauggacuggcuggugaaga

SEQ ID NO: 9192 - RNA, 22 nt, Artificial Sequence
  Synthetic
acuggcuggugaagaaugucac

SEQ ID NO: 9193 - RNA, 22 nt, Artificial Sequence
  Synthetic
aggccuguaggugacauucuuc

SEQ ID NO: 9194 - RNA, 22 nt, Artificial Sequence
  Synthetic
aggugacauucuucaccagcca

SEQ ID NO: 9195 - RNA, 22 nt, Artificial Sequence
  Synthetic
agugaggccuguaggugacauu

SEQ ID NO: 9196 - RNA, 22 nt, Artificial Sequence
  Synthetic
aucgugacuauggacuggcugg

SEQ ID NO: 9197 - RNA, 22 nt, Artificial Sequence
  Synthetic
auggacuggcuggugaagaaug

SEQ ID NO: 9198 - RNA, 22 nt, Artificial Sequence
  Synthetic
auucuucaccagccaguccaua

SEQ ID NO: 9199 - RNA, 22 nt, Artificial Sequence
  Synthetic
cagugaggccuguaggugacau

SEQ ID NO: 9200 - RNA, 22 nt, Artificial Sequence
  Synthetic
cauucuucaccagccaguccau

SEQ ID NO: 9201 - RNA, 22 nt, Artificial Sequence
  Synthetic
ccuguaggugacauucuucacc

SEQ ID NO: 9202 - RNA, 22 nt, Artificial Sequence
  Synthetic
cgugacuauggacuggcuggug

SEQ ID NO: 9203 - RNA, 22 nt, Artificial Sequence
  Synthetic
cuauggacuggcuggugaagaa

SEQ ID NO: 9204 - RNA, 22 nt, Artificial Sequence
  Synthetic
cuggcuggugaagaaugucacc

SEQ ID NO: 9205 - RNA, 22 nt, Artificial Sequence
  Synthetic
cuggugaagaaugucaccuaca

SEQ ID NO: 9206 - RNA, 22 nt, Artificial Sequence
  Synthetic
cuguaggugacauucuucacca

SEQ ID NO: 9207 - RNA, 22 nt, Artificial Sequence
  Synthetic
cuucaccagccaguccauaguc

SEQ ID NO: 9208 - RNA, 22 nt, Artificial Sequence
  Synthetic
gaagaaugucaccuacaggccu

SEQ ID NO: 9209 - RNA, 22 nt, Artificial Sequence
  Synthetic
gacauucuucaccagccagucc

SEQ ID NO: 9210 - RNA, 22 nt, Artificial Sequence
  Synthetic
gacuauggacuggcuggugaag

SEQ ID NO: 9211 - RNA, 22 nt, Artificial Sequence
  Synthetic
gacuggcuggugaagaauguca

SEQ ID NO: 9212 - RNA, 22 nt, Artificial Sequence
  Synthetic
gaggccuguaggugacauucuu

SEQ ID NO: 9213 - RNA, 22 nt, Artificial Sequence
  Synthetic
gcagugaggccuguaggugaca

SEQ ID NO: 9214 - RNA, 22 nt, Artificial Sequence
  Synthetic
gccuguaggugacauucuucac

SEQ ID NO: 9215 - RNA, 22 nt, Artificial Sequence
  Synthetic
gcuggugaagaaugucaccuac

SEQ ID NO: 9216 - RNA, 22 nt, Artificial Sequence
  Synthetic
ggacuggcuggugaagaauguc

SEQ ID NO: 9217 - RNA, 22 nt, Artificial Sequence
  Synthetic
ggccuguaggugacauucuuca

SEQ ID NO: 9218 - RNA, 22 nt, Artificial Sequence
  Synthetic
ggcuggugaagaaugucaccua

SEQ ID NO: 9219 - RNA, 22 nt, Artificial Sequence
  Synthetic
ggugaagaaugucaccuacagg

SEQ ID NO: 9220 - RNA, 22 nt, Artificial Sequence
  Synthetic
ggugacauucuucaccagccag

SEQ ID NO: 9221 - RNA, 22 nt, Artificial Sequence
  Synthetic
guaggugacauucuucaccagc

SEQ ID NO: 9222 - RNA, 22 nt, Artificial Sequence
  Synthetic
gugaagaaugucaccuacaggc

SEQ ID NO: 9223 - RNA, 22 nt, Artificial Sequence
  Synthetic
gugacauucuucaccagccagu

SEQ ID NO: 9224 - RNA, 22 nt, Artificial Sequence
  Synthetic
gugacuauggacuggcugguga

SEQ ID NO: 9225 - RNA, 22 nt, Artificial Sequence
  Synthetic
gugaggccuguaggugacauuc

SEQ ID NO: 9226 - RNA, 22 nt, Artificial Sequence
  Synthetic
uaggugacauucuucaccagcc

SEQ ID NO: 9227 - RNA, 22 nt, Artificial Sequence
  Synthetic
uauggacuggcuggugaagaau

SEQ ID NO: 9228 - RNA, 22 nt, Artificial Sequence
  Synthetic
ucgugacuauggacuggcuggu

SEQ ID NO: 9229 - RNA, 22 nt, Artificial Sequence
  Synthetic
ucuucaccagccaguccauagu

SEQ ID NO: 9230 - RNA, 22 nt, Artificial Sequence
  Synthetic
ugaagaaugucaccuacaggcc

SEQ ID NO: 9231 - RNA, 22 nt, Artificial Sequence
  Synthetic
ugacauucuucaccagccaguc

SEQ ID NO: 9232 - RNA, 22 nt, Artificial Sequence
  Synthetic
ugacuauggacuggcuggugaa

SEQ ID NO: 9233 - RNA, 22 nt, Artificial Sequence
  Synthetic
ugaggccuguaggugacauucu

SEQ ID NO: 9234 - RNA, 22 nt, Artificial Sequence
  Synthetic
uggacuggcuggugaagaaugu

SEQ ID NO: 9235 - RNA, 22 nt, Artificial Sequence
  Synthetic
uggcuggugaagaaugucaccu

SEQ ID NO: 9236 - RNA, 22 nt, Artificial Sequence
  Synthetic
uggugaagaaugucaccuacag

SEQ ID NO: 9237 - RNA, 22 nt, Artificial Sequence
  Synthetic
uguaggugacauucuucaccag

SEQ ID NO: 9238 - RNA, 22 nt, Artificial Sequence
  Synthetic
uucuucaccagccaguccauag

SEQ ID NO: 9239 - RNA, 20 nt, Artificial Sequence
  Synthetic
acauuccucaccagccaguc

SEQ ID NO: 9240 - RNA, 20 nt, Artificial Sequence
  Synthetic
acauuggcaucgugacuacg

SEQ ID NO: 9241 - RNA, 20 nt, Artificial Sequence
  Synthetic
accagccaguccguagucac

SEQ ID NO: 9242 - RNA, 20 nt, Artificial Sequence
  Synthetic
acggacuggcuggugaggaa

SEQ ID NO: 9243 - RNA, 20 nt, Artificial Sequence
  Synthetic
acuacggacuggcuggugag

SEQ ID NO: 9244 - RNA, 20 nt, Artificial Sequence
  Synthetic
agccaguccguagucacgau

SEQ ID NO: 9245 - RNA, 20 nt, Artificial Sequence
  Synthetic
aguccguagucacgaugcca

SEQ ID NO: 9246 - RNA, 20 nt, Artificial Sequence
  Synthetic
aucgugacuacggacuggcu

SEQ ID NO: 9247 - RNA, 20 nt, Artificial Sequence
  Synthetic
augacauuggcaucgugacu

SEQ ID NO: 9248 - RNA, 20 nt, Artificial Sequence
  Synthetic
auuccucaccagccaguccg

SEQ ID NO: 9249 - RNA, 20 nt, Artificial Sequence
  Synthetic
auuggcaucgugacuacgga

SEQ ID NO: 9250 - RNA, 20 nt, Artificial Sequence
  Synthetic
caccagccaguccguaguca

SEQ ID NO: 9251 - RNA, 20 nt, Artificial Sequence
  Synthetic
cagccaguccguagucacga

SEQ ID NO: 9252 - RNA, 20 nt, Artificial Sequence
  Synthetic
caguccguagucacgaugcc

SEQ ID NO: 9253 - RNA, 20 nt, Artificial Sequence
  Synthetic
caucgugacuacggacuggc

SEQ ID NO: 9254 - RNA, 20 nt, Artificial Sequence
  Synthetic
caugacauuggcaucgugac

SEQ ID NO: 9255 - RNA, 20 nt, Artificial Sequence
  Synthetic
cauuccucaccagccagucc

SEQ ID NO: 9256 - RNA, 20 nt, Artificial Sequence
  Synthetic
cauuggcaucgugacuacgg

SEQ ID NO: 9257 - RNA, 20 nt, Artificial Sequence
  Synthetic
ccagccaguccguagucacg

SEQ ID NO: 9258 - RNA, 20 nt, Artificial Sequence
  Synthetic
ccaguccguagucacgaugc

SEQ ID NO: 9259 - RNA, 20 nt, Artificial Sequence
  Synthetic
ccaugacauuggcaucguga

SEQ ID NO: 9260 - RNA, 20 nt, Artificial Sequence
  Synthetic
ccguagucacgaugccaaug

SEQ ID NO: 9261 - RNA, 20 nt, Artificial Sequence
  Synthetic
ccucaccagccaguccguag

SEQ ID NO: 9262 - RNA, 20 nt, Artificial Sequence
  Synthetic
cguagucacgaugccaaugu

SEQ ID NO: 9263 - RNA, 20 nt, Artificial Sequence
  Synthetic
cgugacuacggacuggcugg

SEQ ID NO: 9264 - RNA, 20 nt, Artificial Sequence
  Synthetic
cuacggacuggcuggugagg

SEQ ID NO: 9265 - RNA, 20 nt, Artificial Sequence
  Synthetic
cucaccagccaguccguagu

SEQ ID NO: 9266 - RNA, 20 nt, Artificial Sequence
  Synthetic
gacauuccucaccagccagu

SEQ ID NO: 9267 - RNA, 20 nt, Artificial Sequence
  Synthetic
gacauuggcaucgugacuac

SEQ ID NO: 9268 - RNA, 20 nt, Artificial Sequence
  Synthetic
gacuacggacuggcugguga

SEQ ID NO: 9269 - RNA, 20 nt, Artificial Sequence
  Synthetic
gcaucgugacuacggacugg

SEQ ID NO: 9270 - RNA, 20 nt, Artificial Sequence
  Synthetic
gccaguccguagucacgaug

SEQ ID NO: 9271 - RNA, 20 nt, Artificial Sequence
  Synthetic
ggcaucgugacuacggacug

SEQ ID NO: 9272 - RNA, 20 nt, Artificial Sequence
  Synthetic
guccguagucacgaugccaa

SEQ ID NO: 9273 - RNA, 20 nt, Artificial Sequence
  Synthetic
gugacuacggacuggcuggu

SEQ ID NO: 9274 - RNA, 20 nt, Artificial Sequence
  Synthetic
uacggacuggcuggugagga

SEQ ID NO: 9275 - RNA, 20 nt, Artificial Sequence
  Synthetic
ucaccagccaguccguaguc

SEQ ID NO: 9276 - RNA, 20 nt, Artificial Sequence
  Synthetic
uccguagucacgaugccaau

SEQ ID NO: 9277 - RNA, 20 nt, Artificial Sequence
  Synthetic
uccucaccagccaguccgua

SEQ ID NO: 9278 - RNA, 20 nt, Artificial Sequence
  Synthetic
ucgugacuacggacuggcug

SEQ ID NO: 9279 - RNA, 20 nt, Artificial Sequence
  Synthetic
ugacauuccucaccagccag

SEQ ID NO: 9280 - RNA, 20 nt, Artificial Sequence
  Synthetic
ugacauuggcaucgugacua

SEQ ID NO: 9281 - RNA, 20 nt, Artificial Sequence
  Synthetic
ugacuacggacuggcuggug

SEQ ID NO: 9282 - RNA, 20 nt, Artificial Sequence
  Synthetic
uggcaucgugacuacggacu

SEQ ID NO: 9283 - RNA, 20 nt, Artificial Sequence
  Synthetic
uuccucaccagccaguccgu

SEQ ID NO: 9284 - RNA, 20 nt, Artificial Sequence
  Synthetic
uuggcaucgugacuacggac

SEQ ID NO: 9285 - RNA, 21 nt, Artificial Sequence
  Synthetic
acauuccucaccagccagucc

SEQ ID NO: 9286 - RNA, 21 nt, Artificial Sequence
  Synthetic
acauuggcaucgugacuacgg

SEQ ID NO: 9287 - RNA, 21 nt, Artificial Sequence
  Synthetic
accagccaguccguagucacg

SEQ ID NO: 9288 - RNA, 21 nt, Artificial Sequence
  Synthetic
acggacuggcuggugaggaau

SEQ ID NO: 9289 - RNA, 21 nt, Artificial Sequence
  Synthetic
acuacggacuggcuggugagg

SEQ ID NO: 9290 - RNA, 21 nt, Artificial Sequence
  Synthetic
agccaguccguagucacgaug

SEQ ID NO: 9291 - RNA, 21 nt, Artificial Sequence
  Synthetic
aguccguagucacgaugccaa

SEQ ID NO: 9292 - RNA, 21 nt, Artificial Sequence
  Synthetic
aucgugacuacggacuggcug

SEQ ID NO: 9293 - RNA, 21 nt, Artificial Sequence
  Synthetic
augacauuggcaucgugacua

SEQ ID NO: 9294 - RNA, 21 nt, Artificial Sequence
  Synthetic
auuccucaccagccaguccgu

SEQ ID NO: 9295 - RNA, 21 nt, Artificial Sequence
  Synthetic
auuggcaucgugacuacggac

SEQ ID NO: 9296 - RNA, 21 nt, Artificial Sequence
  Synthetic
caccagccaguccguagucac

SEQ ID NO: 9297 - RNA, 21 nt, Artificial Sequence
  Synthetic
cagccaguccguagucacgau

SEQ ID NO: 9298 - RNA, 21 nt, Artificial Sequence
  Synthetic
caguccguagucacgaugcca

SEQ ID NO: 9299 - RNA, 21 nt, Artificial Sequence
  Synthetic
caucgugacuacggacuggcu

SEQ ID NO: 9300 - RNA, 21 nt, Artificial Sequence
  Synthetic
caugacauuggcaucgugacu

SEQ ID NO: 9301 - RNA, 21 nt, Artificial Sequence
  Synthetic
cauuccucaccagccaguccg

SEQ ID NO: 9302 - RNA, 21 nt, Artificial Sequence
  Synthetic
cauuggcaucgugacuacgga

SEQ ID NO: 9303 - RNA, 21 nt, Artificial Sequence
  Synthetic
ccagccaguccguagucacga

SEQ ID NO: 9304 - RNA, 21 nt, Artificial Sequence
  Synthetic
ccaguccguagucacgaugcc

SEQ ID NO: 9305 - RNA, 21 nt, Artificial Sequence
  Synthetic
ccaugacauuggcaucgugac

SEQ ID NO: 9306 - RNA, 21 nt, Artificial Sequence
  Synthetic
ccguagucacgaugccaaugu

SEQ ID NO: 9307 - RNA, 21 nt, Artificial Sequence
  Synthetic
ccucaccagccaguccguagu

SEQ ID NO: 9308 - RNA, 21 nt, Artificial Sequence
  Synthetic
cguagucacgaugccaauguc

SEQ ID NO: 9309 - RNA, 21 nt, Artificial Sequence
  Synthetic
cgugacuacggacuggcuggu

SEQ ID NO: 9310 - RNA, 21 nt, Artificial Sequence
  Synthetic
cuacggacuggcuggugagga

SEQ ID NO: 9311 - RNA, 21 nt, Artificial Sequence
  Synthetic
cucaccagccaguccguaguc

SEQ ID NO: 9312 - RNA, 21 nt, Artificial Sequence
  Synthetic
gacauuccucaccagccaguc

SEQ ID NO: 9313 - RNA, 21 nt, Artificial Sequence
  Synthetic
gacauuggcaucgugacuacg

SEQ ID NO: 9314 - RNA, 21 nt, Artificial Sequence
  Synthetic
gacuacggacuggcuggugag

SEQ ID NO: 9315 - RNA, 21 nt, Artificial Sequence
  Synthetic
gcaucgugacuacggacuggc

SEQ ID NO: 9316 - RNA, 21 nt, Artificial Sequence
  Synthetic
gccaguccguagucacgaugc

SEQ ID NO: 9317 - RNA, 21 nt, Artificial Sequence
  Synthetic
ggcaucgugacuacggacugg

SEQ ID NO: 9318 - RNA, 21 nt, Artificial Sequence
  Synthetic
guccguagucacgaugccaau

SEQ ID NO: 9319 - RNA, 21 nt, Artificial Sequence
  Synthetic
gugacauuccucaccagccag

SEQ ID NO: 9320 - RNA, 21 nt, Artificial Sequence
  Synthetic
gugacuacggacuggcuggug

SEQ ID NO: 9321 - RNA, 21 nt, Artificial Sequence
  Synthetic
uacggacuggcuggugaggaa

SEQ ID NO: 9322 - RNA, 21 nt, Artificial Sequence
  Synthetic
ucaccagccaguccguaguca

SEQ ID NO: 9323 - RNA, 21 nt, Artificial Sequence
  Synthetic
uccaugacauuggcaucguga

SEQ ID NO: 9324 - RNA, 21 nt, Artificial Sequence
  Synthetic
uccguagucacgaugccaaug

SEQ ID NO: 9325 - RNA, 21 nt, Artificial Sequence
  Synthetic
uccucaccagccaguccguag

SEQ ID NO: 9326 - RNA, 21 nt, Artificial Sequence
  Synthetic
ucgugacuacggacuggcugg

SEQ ID NO: 9327 - RNA, 21 nt, Artificial Sequence
  Synthetic
ugacauuccucaccagccagu

SEQ ID NO: 9328 - RNA, 21 nt, Artificial Sequence
  Synthetic
ugacauuggcaucgugacuac

SEQ ID NO: 9329 - RNA, 21 nt, Artificial Sequence
  Synthetic
ugacuacggacuggcugguga

SEQ ID NO: 9330 - RNA, 21 nt, Artificial Sequence
  Synthetic
uggcaucgugacuacggacug

SEQ ID NO: 9331 - RNA, 21 nt, Artificial Sequence
  Synthetic
uuccucaccagccaguccgua

SEQ ID NO: 9332 - RNA, 21 nt, Artificial Sequence
  Synthetic
uuggcaucgugacuacggacu

SEQ ID NO: 9333 - RNA, 22 nt, Artificial Sequence
  Synthetic
acauuccucaccagccaguccg

SEQ ID NO: 9334 - RNA, 22 nt, Artificial Sequence
  Synthetic
acauuggcaucgugacuacgga

SEQ ID NO: 9335 - RNA, 22 nt, Artificial Sequence
  Synthetic
accagccaguccguagucacga

SEQ ID NO: 9336 - RNA, 22 nt, Artificial Sequence
  Synthetic
acggacuggcuggugaggaaug

SEQ ID NO: 9337 - RNA, 22 nt, Artificial Sequence
  Synthetic
acuacggacuggcuggugagga

SEQ ID NO: 9338 - RNA, 22 nt, Artificial Sequence
  Synthetic
agccaguccguagucacgaugc

SEQ ID NO: 9339 - RNA, 22 nt, Artificial Sequence
  Synthetic
aguccguagucacgaugccaau

SEQ ID NO: 9340 - RNA, 22 nt, Artificial Sequence
  Synthetic
aucgugacuacggacuggcugg

SEQ ID NO: 9341 - RNA, 22 nt, Artificial Sequence
  Synthetic
augacauuggcaucgugacuac

SEQ ID NO: 9342 - RNA, 22 nt, Artificial Sequence
  Synthetic
auuccucaccagccaguccgua

SEQ ID NO: 9343 - RNA, 22 nt, Artificial Sequence
  Synthetic
auuggcaucgugacuacggacu

SEQ ID NO: 9344 - RNA, 22 nt, Artificial Sequence
  Synthetic
caccagccaguccguagucacg

SEQ ID NO: 9345 - RNA, 22 nt, Artificial Sequence
  Synthetic
cagccaguccguagucacgaug

SEQ ID NO: 9346 - RNA, 22 nt, Artificial Sequence
  Synthetic
caguccguagucacgaugccaa

SEQ ID NO: 9347 - RNA, 22 nt, Artificial Sequence
  Synthetic
caucgugacuacggacuggcug

SEQ ID NO: 9348 - RNA, 22 nt, Artificial Sequence
  Synthetic
caugacauuggcaucgugacua

SEQ ID NO: 9349 - RNA, 22 nt, Artificial Sequence
  Synthetic
cauuccucaccagccaguccgu

SEQ ID NO: 9350 - RNA, 22 nt, Artificial Sequence
  Synthetic
cauuggcaucgugacuacggac

SEQ ID NO: 9351 - RNA, 22 nt, Artificial Sequence
  Synthetic
ccagccaguccguagucacgau

SEQ ID NO: 9352 - RNA, 22 nt, Artificial Sequence
  Synthetic
ccaguccguagucacgaugcca

SEQ ID NO: 9353 - RNA, 22 nt, Artificial Sequence
  Synthetic
ccaugacauuggcaucgugacu

SEQ ID NO: 9354 - RNA, 22 nt, Artificial Sequence
  Synthetic
ccguagucacgaugccaauguc

SEQ ID NO: 9355 - RNA, 22 nt, Artificial Sequence
  Synthetic
ccucaccagccaguccguaguc

SEQ ID NO: 9356 - RNA, 22 nt, Artificial Sequence
  Synthetic
cguagucacgaugccaauguca

SEQ ID NO: 9357 - RNA, 22 nt, Artificial Sequence
  Synthetic
cgugacuacggacuggcuggug

SEQ ID NO: 9358 - RNA, 22 nt, Artificial Sequence
  Synthetic
cuacggacuggcuggugaggaa

SEQ ID NO: 9359 - RNA, 22 nt, Artificial Sequence
  Synthetic
cucaccagccaguccguaguca

SEQ ID NO: 9360 - RNA, 22 nt, Artificial Sequence
  Synthetic
cuccaugacauuggcaucguga

SEQ ID NO: 9361 - RNA, 22 nt, Artificial Sequence
  Synthetic
gacauuccucaccagccagucc

SEQ ID NO: 9362 - RNA, 22 nt, Artificial Sequence
  Synthetic
gacauuggcaucgugacuacgg

SEQ ID NO: 9363 - RNA, 22 nt, Artificial Sequence
  Synthetic
gacuacggacuggcuggugagg

SEQ ID NO: 9364 - RNA, 22 nt, Artificial Sequence
  Synthetic
gcaucgugacuacggacuggcu

SEQ ID NO: 9365 - RNA, 22 nt, Artificial Sequence
  Synthetic
gccaguccguagucacgaugcc

SEQ ID NO: 9366 - RNA, 22 nt, Artificial Sequence
  Synthetic
ggcaucgugacuacggacuggc

SEQ ID NO: 9367 - RNA, 22 nt, Artificial Sequence
  Synthetic
ggugacauuccucaccagccag

SEQ ID NO: 9368 - RNA, 22 nt, Artificial Sequence
  Synthetic
guccguagucacgaugccaaug

SEQ ID NO: 9369 - RNA, 22 nt, Artificial Sequence
  Synthetic
gugacauuccucaccagccagu

SEQ ID NO: 9370 - RNA, 22 nt, Artificial Sequence
  Synthetic
gugacuacggacuggcugguga

SEQ ID NO: 9371 - RNA, 22 nt, Artificial Sequence
  Synthetic
uacggacuggcuggugaggaau

SEQ ID NO: 9372 - RNA, 22 nt, Artificial Sequence
  Synthetic
ucaccagccaguccguagucac

SEQ ID NO: 9373 - RNA, 22 nt, Artificial Sequence
  Synthetic
uccaugacauuggcaucgugac

SEQ ID NO: 9374 - RNA, 22 nt, Artificial Sequence
  Synthetic
uccguagucacgaugccaaugu

SEQ ID NO: 9375 - RNA, 22 nt, Artificial Sequence
  Synthetic
uccucaccagccaguccguagu

SEQ ID NO: 9376 - RNA, 22 nt, Artificial Sequence
  Synthetic
ucgugacuacggacuggcuggu

SEQ ID NO: 9377 - RNA, 22 nt, Artificial Sequence
  Synthetic
ugacauuccucaccagccaguc

SEQ ID NO: 9378 - RNA, 22 nt, Artificial Sequence
  Synthetic
ugacauuggcaucgugacuacg

SEQ ID NO: 9379 - RNA, 22 nt, Artificial Sequence
  Synthetic
ugacuacggacuggcuggugag

SEQ ID NO: 9380 - RNA, 22 nt, Artificial Sequence
  Synthetic
uggcaucgugacuacggacugg

SEQ ID NO: 9381 - RNA, 22 nt, Artificial Sequence
  Synthetic
uuccucaccagccaguccguag

SEQ ID NO: 9382 - RNA, 22 nt, Artificial Sequence
  Synthetic
uuggcaucgugacuacggacug

SEQ ID NO: 9383 - RNA, 20 nt, Artificial Sequence
  Synthetic
aaucacgaugccaaugucau

SEQ ID NO: 9384 - RNA, 20 nt, Artificial Sequence
  Synthetic
acauuggcaucgugauuaug

SEQ ID NO: 9385 - RNA, 20 nt, Artificial Sequence
  Synthetic
accagccaguccauaaucac

SEQ ID NO: 9386 - RNA, 20 nt, Artificial Sequence
  Synthetic
agccaguccauaaucacgau

SEQ ID NO: 9387 - RNA, 20 nt, Artificial Sequence
  Synthetic
aguccauaaucacgaugcca

SEQ ID NO: 9388 - RNA, 20 nt, Artificial Sequence
  Synthetic
auaaucacgaugccaauguc

SEQ ID NO: 9389 - RNA, 20 nt, Artificial Sequence
  Synthetic
aucgugauuauggacuggcu

SEQ ID NO: 9390 - RNA, 20 nt, Artificial Sequence
  Synthetic
augacauuggcaucgugauu

SEQ ID NO: 9391 - RNA, 20 nt, Artificial Sequence
  Synthetic
auuauggacuggcuggugag

SEQ ID NO: 9392 - RNA, 20 nt, Artificial Sequence
  Synthetic
auuccucaccagccagucca

SEQ ID NO: 9393 - RNA, 20 nt, Artificial Sequence
  Synthetic
auuggcaucgugauuaugga

SEQ ID NO: 9394 - RNA, 20 nt, Artificial Sequence
  Synthetic
caccagccaguccauaauca

SEQ ID NO: 9395 - RNA, 20 nt, Artificial Sequence
  Synthetic
cagccaguccauaaucacga

SEQ ID NO: 9396 - RNA, 20 nt, Artificial Sequence
  Synthetic
caguccauaaucacgaugcc

SEQ ID NO: 9397 - RNA, 20 nt, Artificial Sequence
  Synthetic
cauaaucacgaugccaaugu

SEQ ID NO: 9398 - RNA, 20 nt, Artificial Sequence
  Synthetic
caucgugauuauggacuggc

SEQ ID NO: 9399 - RNA, 20 nt, Artificial Sequence
  Synthetic
caugacauuggcaucgugau

SEQ ID NO: 9400 - RNA, 20 nt, Artificial Sequence
  Synthetic
cauuggcaucgugauuaugg

SEQ ID NO: 9401 - RNA, 20 nt, Artificial Sequence
  Synthetic
ccagccaguccauaaucacg

SEQ ID NO: 9402 - RNA, 20 nt, Artificial Sequence
  Synthetic
ccaguccauaaucacgaugc

SEQ ID NO: 9403 - RNA, 20 nt, Artificial Sequence
  Synthetic
ccauaaucacgaugccaaug

SEQ ID NO: 9404 - RNA, 20 nt, Artificial Sequence
  Synthetic
ccucaccagccaguccauaa

SEQ ID NO: 9405 - RNA, 20 nt, Artificial Sequence
  Synthetic
ccuccaugacauuggcaucg

SEQ ID NO: 9406 - RNA, 20 nt, Artificial Sequence
  Synthetic
cgugauuauggacuggcugg

SEQ ID NO: 9407 - RNA, 20 nt, Artificial Sequence
  Synthetic
cucaccagccaguccauaau

SEQ ID NO: 9408 - RNA, 20 nt, Artificial Sequence
  Synthetic
cuccaugacauuggcaucgu

SEQ ID NO: 9409 - RNA, 20 nt, Artificial Sequence
  Synthetic
gacauuggcaucgugauuau

SEQ ID NO: 9410 - RNA, 20 nt, Artificial Sequence
  Synthetic
gauuauggacuggcugguga

SEQ ID NO: 9411 - RNA, 20 nt, Artificial Sequence
  Synthetic
gcaucgugauuauggacugg

SEQ ID NO: 9412 - RNA, 20 nt, Artificial Sequence
  Synthetic
gccaguccauaaucacgaug

SEQ ID NO: 9413 - RNA, 20 nt, Artificial Sequence
  Synthetic
ggcaucgugauuauggacug

SEQ ID NO: 9414 - RNA, 20 nt, Artificial Sequence
  Synthetic
guccauaaucacgaugccaa

SEQ ID NO: 9415 - RNA, 20 nt, Artificial Sequence
  Synthetic
gugauuauggacuggcuggu

SEQ ID NO: 9416 - RNA, 20 nt, Artificial Sequence
  Synthetic
uaaucacgaugccaauguca

SEQ ID NO: 9417 - RNA, 20 nt, Artificial Sequence
  Synthetic
ucaccagccaguccauaauc

SEQ ID NO: 9418 - RNA, 20 nt, Artificial Sequence
  Synthetic
uccauaaucacgaugccaau

SEQ ID NO: 9419 - RNA, 20 nt, Artificial Sequence
  Synthetic
uccaugacauuggcaucgug

SEQ ID NO: 9420 - RNA, 20 nt, Artificial Sequence
  Synthetic
uccucaccagccaguccaua

SEQ ID NO: 9421 - RNA, 20 nt, Artificial Sequence
  Synthetic
ucgugauuauggacuggcug

SEQ ID NO: 9422 - RNA, 20 nt, Artificial Sequence
  Synthetic
ugacauuggcaucgugauua

SEQ ID NO: 9423 - RNA, 20 nt, Artificial Sequence
  Synthetic
ugauuauggacuggcuggug

SEQ ID NO: 9424 - RNA, 20 nt, Artificial Sequence
  Synthetic
uggcaucgugauuauggacu

SEQ ID NO: 9425 - RNA, 20 nt, Artificial Sequence
  Synthetic
uuccucaccagccaguccau

SEQ ID NO: 9426 - RNA, 20 nt, Artificial Sequence
  Synthetic
uuggcaucgugauuauggac

SEQ ID NO: 9427 - RNA, 21 nt, Artificial Sequence
  Synthetic
aaucacgaugccaaugucaug

SEQ ID NO: 9428 - RNA, 21 nt, Artificial Sequence
  Synthetic
acauuggcaucgugauuaugg

SEQ ID NO: 9429 - RNA, 21 nt, Artificial Sequence
  Synthetic
accagccaguccauaaucacg

SEQ ID NO: 9430 - RNA, 21 nt, Artificial Sequence
  Synthetic
accuccaugacauuggcaucg

SEQ ID NO: 9431 - RNA, 21 nt, Artificial Sequence
  Synthetic
agccaguccauaaucacgaug

SEQ ID NO: 9432 - RNA, 21 nt, Artificial Sequence
  Synthetic
aguccauaaucacgaugccaa

SEQ ID NO: 9433 - RNA, 21 nt, Artificial Sequence
  Synthetic
auaaucacgaugccaauguca

SEQ ID NO: 9434 - RNA, 21 nt, Artificial Sequence
  Synthetic
aucgugauuauggacuggcug

SEQ ID NO: 9435 - RNA, 21 nt, Artificial Sequence
  Synthetic
augacauuggcaucgugauua

SEQ ID NO: 9436 - RNA, 21 nt, Artificial Sequence
  Synthetic
auuauggacuggcuggugagg

SEQ ID NO: 9437 - RNA, 21 nt, Artificial Sequence
  Synthetic
auuccucaccagccaguccau

SEQ ID NO: 9438 - RNA, 21 nt, Artificial Sequence
  Synthetic
auuggcaucgugauuauggac

SEQ ID NO: 9439 - RNA, 21 nt, Artificial Sequence
  Synthetic
caccagccaguccauaaucac

SEQ ID NO: 9440 - RNA, 21 nt, Artificial Sequence
  Synthetic
cagccaguccauaaucacgau

SEQ ID NO: 9441 - RNA, 21 nt, Artificial Sequence
  Synthetic
caguccauaaucacgaugcca

SEQ ID NO: 9442 - RNA, 21 nt, Artificial Sequence
  Synthetic
cauaaucacgaugccaauguc

SEQ ID NO: 9443 - RNA, 21 nt, Artificial Sequence
  Synthetic
caucgugauuauggacuggcu

SEQ ID NO: 9444 - RNA, 21 nt, Artificial Sequence
  Synthetic
caugacauuggcaucgugauu

SEQ ID NO: 9445 - RNA, 21 nt, Artificial Sequence
  Synthetic
cauuccucaccagccagucca

SEQ ID NO: 9446 - RNA, 21 nt, Artificial Sequence
  Synthetic
cauuggcaucgugauuaugga

SEQ ID NO: 9447 - RNA, 21 nt, Artificial Sequence
  Synthetic
ccagccaguccauaaucacga

SEQ ID NO: 9448 - RNA, 21 nt, Artificial Sequence
  Synthetic
ccaguccauaaucacgaugcc

SEQ ID NO: 9449 - RNA, 21 nt, Artificial Sequence
  Synthetic
ccauaaucacgaugccaaugu

SEQ ID NO: 9450 - RNA, 21 nt, Artificial Sequence
  Synthetic
ccaugacauuggcaucgugau

SEQ ID NO: 9451 - RNA, 21 nt, Artificial Sequence
  Synthetic
ccucaccagccaguccauaau

SEQ ID NO: 9452 - RNA, 21 nt, Artificial Sequence
  Synthetic
ccuccaugacauuggcaucgu

SEQ ID NO: 9453 - RNA, 21 nt, Artificial Sequence
  Synthetic
cgugauuauggacuggcuggu

SEQ ID NO: 9454 - RNA, 21 nt, Artificial Sequence
  Synthetic
cucaccagccaguccauaauc

SEQ ID NO: 9455 - RNA, 21 nt, Artificial Sequence
  Synthetic
cuccaugacauuggcaucgug

SEQ ID NO: 9456 - RNA, 21 nt, Artificial Sequence
  Synthetic
gacauuggcaucgugauuaug

SEQ ID NO: 9457 - RNA, 21 nt, Artificial Sequence
  Synthetic
gauuauggacuggcuggugag

SEQ ID NO: 9458 - RNA, 21 nt, Artificial Sequence
  Synthetic
gcaucgugauuauggacuggc

SEQ ID NO: 9459 - RNA, 21 nt, Artificial Sequence
  Synthetic
gccaguccauaaucacgaugc

SEQ ID NO: 9460 - RNA, 21 nt, Artificial Sequence
  Synthetic
ggcaucgugauuauggacugg

SEQ ID NO: 9461 - RNA, 21 nt, Artificial Sequence
  Synthetic
guccauaaucacgaugccaau

SEQ ID NO: 9462 - RNA, 21 nt, Artificial Sequence
  Synthetic
gugauuauggacuggcuggug

SEQ ID NO: 9463 - RNA, 21 nt, Artificial Sequence
  Synthetic
uaaucacgaugccaaugucau

SEQ ID NO: 9464 - RNA, 21 nt, Artificial Sequence
  Synthetic
ucaccagccaguccauaauca

SEQ ID NO: 9465 - RNA, 21 nt, Artificial Sequence
  Synthetic
uccauaaucacgaugccaaug

SEQ ID NO: 9466 - RNA, 21 nt, Artificial Sequence
  Synthetic
uccucaccagccaguccauaa

SEQ ID NO: 9467 - RNA, 21 nt, Artificial Sequence
  Synthetic
ucgugauuauggacuggcugg

SEQ ID NO: 9468 - RNA, 21 nt, Artificial Sequence
  Synthetic
ugacauuggcaucgugauuau

SEQ ID NO: 9469 - RNA, 21 nt, Artificial Sequence
  Synthetic
ugauuauggacuggcugguga

SEQ ID NO: 9470 - RNA, 21 nt, Artificial Sequence
  Synthetic
uggcaucgugauuauggacug

SEQ ID NO: 9471 - RNA, 21 nt, Artificial Sequence
  Synthetic
uuccucaccagccaguccaua

SEQ ID NO: 9472 - RNA, 21 nt, Artificial Sequence
  Synthetic
uuggcaucgugauuauggacu

SEQ ID NO: 9473 - RNA, 22 nt, Artificial Sequence
  Synthetic
aaucacgaugccaaugucaugg

SEQ ID NO: 9474 - RNA, 22 nt, Artificial Sequence
  Synthetic
acauuccucaccagccagucca

SEQ ID NO: 9475 - RNA, 22 nt, Artificial Sequence
  Synthetic
acauuggcaucgugauuaugga

SEQ ID NO: 9476 - RNA, 22 nt, Artificial Sequence
  Synthetic
accagccaguccauaaucacga

SEQ ID NO: 9477 - RNA, 22 nt, Artificial Sequence
  Synthetic
accuccaugacauuggcaucgu

SEQ ID NO: 9478 - RNA, 22 nt, Artificial Sequence
  Synthetic
agccaguccauaaucacgaugc

SEQ ID NO: 9479 - RNA, 22 nt, Artificial Sequence
  Synthetic
aguccauaaucacgaugccaau

SEQ ID NO: 9480 - RNA, 22 nt, Artificial Sequence
  Synthetic
auaaucacgaugccaaugucau

SEQ ID NO: 9481 - RNA, 22 nt, Artificial Sequence
  Synthetic
aucgugauuauggacuggcugg

SEQ ID NO: 9482 - RNA, 22 nt, Artificial Sequence
  Synthetic
augacauuggcaucgugauuau

SEQ ID NO: 9483 - RNA, 22 nt, Artificial Sequence
  Synthetic
auuauggacuggcuggugagga

SEQ ID NO: 9484 - RNA, 22 nt, Artificial Sequence
  Synthetic
auuccucaccagccaguccaua

SEQ ID NO: 9485 - RNA, 22 nt, Artificial Sequence
  Synthetic
auuggcaucgugauuauggacu

SEQ ID NO: 9486 - RNA, 22 nt, Artificial Sequence
  Synthetic
caccagccaguccauaaucacg

SEQ ID NO: 9487 - RNA, 22 nt, Artificial Sequence
  Synthetic
caccuccaugacauuggcaucg

SEQ ID NO: 9488 - RNA, 22 nt, Artificial Sequence
  Synthetic
cagccaguccauaaucacgaug

SEQ ID NO: 9489 - RNA, 22 nt, Artificial Sequence
  Synthetic
caguccauaaucacgaugccaa

SEQ ID NO: 9490 - RNA, 22 nt, Artificial Sequence
  Synthetic
cauaaucacgaugccaauguca

SEQ ID NO: 9491 - RNA, 22 nt, Artificial Sequence
  Synthetic
caucgugauuauggacuggcug

SEQ ID NO: 9492 - RNA, 22 nt, Artificial Sequence
  Synthetic
caugacauuggcaucgugauua

SEQ ID NO: 9493 - RNA, 22 nt, Artificial Sequence
  Synthetic
cauuccucaccagccaguccau

SEQ ID NO: 9494 - RNA, 22 nt, Artificial Sequence
  Synthetic
cauuggcaucgugauuauggac

SEQ ID NO: 9495 - RNA, 22 nt, Artificial Sequence
  Synthetic
ccagccaguccauaaucacgau

SEQ ID NO: 9496 - RNA, 22 nt, Artificial Sequence
  Synthetic
ccaguccauaaucacgaugcca

SEQ ID NO: 9497 - RNA, 22 nt, Artificial Sequence
  Synthetic
ccauaaucacgaugccaauguc

SEQ ID NO: 9498 - RNA, 22 nt, Artificial Sequence
  Synthetic
ccaugacauuggcaucgugauu

SEQ ID NO: 9499 - RNA, 22 nt, Artificial Sequence
  Synthetic
ccucaccagccaguccauaauc

SEQ ID NO: 9500 - RNA, 22 nt, Artificial Sequence
  Synthetic
ccuccaugacauuggcaucgug

SEQ ID NO: 9501 - RNA, 22 nt, Artificial Sequence
  Synthetic
cgugauuauggacuggcuggug

SEQ ID NO: 9502 - RNA, 22 nt, Artificial Sequence
  Synthetic
cucaccagccaguccauaauca

SEQ ID NO: 9503 - RNA, 22 nt, Artificial Sequence
  Synthetic
gacauuggcaucgugauuaugg

SEQ ID NO: 9504 - RNA, 22 nt, Artificial Sequence
  Synthetic
gauuauggacuggcuggugagg

SEQ ID NO: 9505 - RNA, 22 nt, Artificial Sequence
  Synthetic
gcaucgugauuauggacuggcu

SEQ ID NO: 9506 - RNA, 22 nt, Artificial Sequence
  Synthetic
gccaguccauaaucacgaugcc

SEQ ID NO: 9507 - RNA, 22 nt, Artificial Sequence
  Synthetic
ggcaucgugauuauggacuggc

SEQ ID NO: 9508 - RNA, 22 nt, Artificial Sequence
  Synthetic
guccauaaucacgaugccaaug

SEQ ID NO: 9509 - RNA, 22 nt, Artificial Sequence
  Synthetic
gugauuauggacuggcugguga

SEQ ID NO: 9510 - RNA, 22 nt, Artificial Sequence
  Synthetic
uaaucacgaugccaaugucaug

SEQ ID NO: 9511 - RNA, 22 nt, Artificial Sequence
  Synthetic
ucaccagccaguccauaaucac

SEQ ID NO: 9512 - RNA, 22 nt, Artificial Sequence
  Synthetic
uccauaaucacgaugccaaugu

SEQ ID NO: 9513 - RNA, 22 nt, Artificial Sequence
  Synthetic
uccaugacauuggcaucgugau

SEQ ID NO: 9514 - RNA, 22 nt, Artificial Sequence
  Synthetic
uccucaccagccaguccauaau

SEQ ID NO: 9515 - RNA, 22 nt, Artificial Sequence
  Synthetic
ucgugauuauggacuggcuggu

SEQ ID NO: 9516 - RNA, 22 nt, Artificial Sequence
  Synthetic
ugacauuggcaucgugauuaug

SEQ ID NO: 9517 - RNA, 22 nt, Artificial Sequence
  Synthetic
ugauuauggacuggcuggugag

SEQ ID NO: 9518 - RNA, 22 nt, Artificial Sequence
  Synthetic
uggcaucgugauuauggacugg

SEQ ID NO: 9519 - RNA, 22 nt, Artificial Sequence
  Synthetic
uuccucaccagccaguccauaa

SEQ ID NO: 9520 - RNA, 22 nt, Artificial Sequence
  Synthetic
uuggcaucgugauuauggacug

SEQ ID NO: 9521 - RNA, 20 nt, Artificial Sequence
  Synthetic
aaugucauggagcugcaagg

SEQ ID NO: 9522 - RNA, 20 nt, Artificial Sequence
  Synthetic
acgaugccaaugucauggag

SEQ ID NO: 9523 - RNA, 20 nt, Artificial Sequence
  Synthetic
agcuccaugacauuggcauc

SEQ ID NO: 9524 - RNA, 20 nt, Artificial Sequence
  Synthetic
agcugcaaggcagccccugg

SEQ ID NO: 9525 - RNA, 20 nt, Artificial Sequence
  Synthetic
aggggcugccuugcagcucc

SEQ ID NO: 9526 - RNA, 20 nt, Artificial Sequence
  Synthetic
augccaaugucauggagcug

SEQ ID NO: 9527 - RNA, 20 nt, Artificial Sequence
  Synthetic
auggagcugcaaggcagccc

SEQ ID NO: 9528 - RNA, 20 nt, Artificial Sequence
  Synthetic
augucauggagcugcaaggc

SEQ ID NO: 9529 - RNA, 20 nt, Artificial Sequence
  Synthetic
caaugucauggagcugcaag

SEQ ID NO: 9530 - RNA, 20 nt, Artificial Sequence
  Synthetic
cacgaugccaaugucaugga

SEQ ID NO: 9531 - RNA, 20 nt, Artificial Sequence
  Synthetic
cagcuccaugacauuggcau

SEQ ID NO: 9532 - RNA, 20 nt, Artificial Sequence
  Synthetic
caggggcugccuugcagcuc

SEQ ID NO: 9533 - RNA, 20 nt, Artificial Sequence
  Synthetic
cauggagcugcaaggcagcc

SEQ ID NO: 9534 - RNA, 20 nt, Artificial Sequence
  Synthetic
ccaaugucauggagcugcaa

SEQ ID NO: 9535 - RNA, 20 nt, Artificial Sequence
  Synthetic
ccaggggcugccuugcagcu

SEQ ID NO: 9536 - RNA, 20 nt, Artificial Sequence
  Synthetic
cccucuccaggggcugccuu

SEQ ID NO: 9537 - RNA, 20 nt, Artificial Sequence
  Synthetic
ccucuccaggggcugccuug

SEQ ID NO: 9538 - RNA, 20 nt, Artificial Sequence
  Synthetic
ccuugcagcuccaugacauu

SEQ ID NO: 9539 - RNA, 20 nt, Artificial Sequence
  Synthetic
cgaugccaaugucauggagc

SEQ ID NO: 9540 - RNA, 20 nt, Artificial Sequence
  Synthetic
cuccaggggcugccuugcag

SEQ ID NO: 9541 - RNA, 20 nt, Artificial Sequence
  Synthetic
cucuccaggggcugccuugc

SEQ ID NO: 9542 - RNA, 20 nt, Artificial Sequence
  Synthetic
cugccuugcagcuccaugac

SEQ ID NO: 9543 - RNA, 20 nt, Artificial Sequence
  Synthetic
cuugcagcuccaugacauug

SEQ ID NO: 9544 - RNA, 20 nt, Artificial Sequence
  Synthetic
gagcugcaaggcagccccug

SEQ ID NO: 9545 - RNA, 20 nt, Artificial Sequence
  Synthetic
gaugccaaugucauggagcu

SEQ ID NO: 9546 - RNA, 20 nt, Artificial Sequence
  Synthetic
gcagcuccaugacauuggca

SEQ ID NO: 9547 - RNA, 20 nt, Artificial Sequence
  Synthetic
gccaaugucauggagcugca

SEQ ID NO: 9548 - RNA, 20 nt, Artificial Sequence
  Synthetic
gccuugcagcuccaugacau

SEQ ID NO: 9549 - RNA, 20 nt, Artificial Sequence
  Synthetic
gcugcaaggcagccccugga

SEQ ID NO: 9550 - RNA, 20 nt, Artificial Sequence
  Synthetic
gcugccuugcagcuccauga

SEQ ID NO: 9551 - RNA, 20 nt, Artificial Sequence
  Synthetic
ggagcugcaaggcagccccu

SEQ ID NO: 9552 - RNA, 20 nt, Artificial Sequence
  Synthetic
ggcugccuugcagcuccaug

SEQ ID NO: 9553 - RNA, 20 nt, Artificial Sequence
  Synthetic
gggcugccuugcagcuccau

SEQ ID NO: 9554 - RNA, 20 nt, Artificial Sequence
  Synthetic
ggggcugccuugcagcucca

SEQ ID NO: 9555 - RNA, 20 nt, Artificial Sequence
  Synthetic
gucacgaugccaaugucaug

SEQ ID NO: 9556 - RNA, 20 nt, Artificial Sequence
  Synthetic
gucauggagcugcaaggcag

SEQ ID NO: 9557 - RNA, 20 nt, Artificial Sequence
  Synthetic
ucacgaugccaaugucaugg

SEQ ID NO: 9558 - RNA, 20 nt, Artificial Sequence
  Synthetic
ucauggagcugcaaggcagc

SEQ ID NO: 9559 - RNA, 20 nt, Artificial Sequence
  Synthetic
uccaggggcugccuugcagc

SEQ ID NO: 9560 - RNA, 20 nt, Artificial Sequence
  Synthetic
ucuccaggggcugccuugca

SEQ ID NO: 9561 - RNA, 20 nt, Artificial Sequence
  Synthetic
ugcagcuccaugacauuggc

SEQ ID NO: 9562 - RNA, 20 nt, Artificial Sequence
  Synthetic
ugccaaugucauggagcugc

SEQ ID NO: 9563 - RNA, 20 nt, Artificial Sequence
  Synthetic
ugccuugcagcuccaugaca

SEQ ID NO: 9564 - RNA, 20 nt, Artificial Sequence
  Synthetic
uggagcugcaaggcagcccc

SEQ ID NO: 9565 - RNA, 20 nt, Artificial Sequence
  Synthetic
ugucauggagcugcaaggca

SEQ ID NO: 9566 - RNA, 20 nt, Artificial Sequence
  Synthetic
uugcagcuccaugacauugg

SEQ ID NO: 9567 - RNA, 21 nt, Artificial Sequence
  Synthetic
aaugucauggagcugcaaggc

SEQ ID NO: 9568 - RNA, 21 nt, Artificial Sequence
  Synthetic
acgaugccaaugucauggagc

SEQ ID NO: 9569 - RNA, 21 nt, Artificial Sequence
  Synthetic
agcuccaugacauuggcaucg

SEQ ID NO: 9570 - RNA, 21 nt, Artificial Sequence
  Synthetic
agcugcaaggcagccccugga

SEQ ID NO: 9571 - RNA, 21 nt, Artificial Sequence
  Synthetic
aggggcugccuugcagcucca

SEQ ID NO: 9572 - RNA, 21 nt, Artificial Sequence
  Synthetic
agucacgaugccaaugucaug

SEQ ID NO: 9573 - RNA, 21 nt, Artificial Sequence
  Synthetic
augccaaugucauggagcugc

SEQ ID NO: 9574 - RNA, 21 nt, Artificial Sequence
  Synthetic
auggagcugcaaggcagcccc

SEQ ID NO: 9575 - RNA, 21 nt, Artificial Sequence
  Synthetic
augucauggagcugcaaggca

SEQ ID NO: 9576 - RNA, 21 nt, Artificial Sequence
  Synthetic
caaugucauggagcugcaagg

SEQ ID NO: 9577 - RNA, 21 nt, Artificial Sequence
  Synthetic
cacgaugccaaugucauggag

SEQ ID NO: 9578 - RNA, 21 nt, Artificial Sequence
  Synthetic
cagcuccaugacauuggcauc

SEQ ID NO: 9579 - RNA, 21 nt, Artificial Sequence
  Synthetic
caggggcugccuugcagcucc

SEQ ID NO: 9580 - RNA, 21 nt, Artificial Sequence
  Synthetic
cauggagcugcaaggcagccc

SEQ ID NO: 9581 - RNA, 21 nt, Artificial Sequence
  Synthetic
ccaaugucauggagcugcaag

SEQ ID NO: 9582 - RNA, 21 nt, Artificial Sequence
  Synthetic
ccaggggcugccuugcagcuc

SEQ ID NO: 9583 - RNA, 21 nt, Artificial Sequence
  Synthetic
cccucuccaggggcugccuug

SEQ ID NO: 9584 - RNA, 21 nt, Artificial Sequence
  Synthetic
ccucuccaggggcugccuugc

SEQ ID NO: 9585 - RNA, 21 nt, Artificial Sequence
  Synthetic
ccuugcagcuccaugacauug

SEQ ID NO: 9586 - RNA, 21 nt, Artificial Sequence
  Synthetic
cgaugccaaugucauggagcu

SEQ ID NO: 9587 - RNA, 21 nt, Artificial Sequence
  Synthetic
cuccaggggcugccuugcagc

SEQ ID NO: 9588 - RNA, 21 nt, Artificial Sequence
  Synthetic
cucuccaggggcugccuugca

SEQ ID NO: 9589 - RNA, 21 nt, Artificial Sequence
  Synthetic
cugccuugcagcuccaugaca

SEQ ID NO: 9590 - RNA, 21 nt, Artificial Sequence
  Synthetic
cuugcagcuccaugacauugg

SEQ ID NO: 9591 - RNA, 21 nt, Artificial Sequence
  Synthetic
gagcugcaaggcagccccugg

SEQ ID NO: 9592 - RNA, 21 nt, Artificial Sequence
  Synthetic
gaugccaaugucauggagcug

SEQ ID NO: 9593 - RNA, 21 nt, Artificial Sequence
  Synthetic
gcagcuccaugacauuggcau

SEQ ID NO: 9594 - RNA, 21 nt, Artificial Sequence
  Synthetic
gccaaugucauggagcugcaa

SEQ ID NO: 9595 - RNA, 21 nt, Artificial Sequence
  Synthetic
gccuugcagcuccaugacauu

SEQ ID NO: 9596 - RNA, 21 nt, Artificial Sequence
  Synthetic
gcugcaaggcagccccuggag

SEQ ID NO: 9597 - RNA, 21 nt, Artificial Sequence
  Synthetic
gcugccuugcagcuccaugac

SEQ ID NO: 9598 - RNA, 21 nt, Artificial Sequence
  Synthetic
ggagcugcaaggcagccccug

SEQ ID NO: 9599 - RNA, 21 nt, Artificial Sequence
  Synthetic
ggcugccuugcagcuccauga

SEQ ID NO: 9600 - RNA, 21 nt, Artificial Sequence
  Synthetic
gggcugccuugcagcuccaug

SEQ ID NO: 9601 - RNA, 21 nt, Artificial Sequence
  Synthetic
ggggcugccuugcagcuccau

SEQ ID NO: 9602 - RNA, 21 nt, Artificial Sequence
  Synthetic
gucacgaugccaaugucaugg

SEQ ID NO: 9603 - RNA, 21 nt, Artificial Sequence
  Synthetic
gucauggagcugcaaggcagc

SEQ ID NO: 9604 - RNA, 21 nt, Artificial Sequence
  Synthetic
ucacgaugccaaugucaugga

SEQ ID NO: 9605 - RNA, 21 nt, Artificial Sequence
  Synthetic
ucauggagcugcaaggcagcc

SEQ ID NO: 9606 - RNA, 21 nt, Artificial Sequence
  Synthetic
uccaggggcugccuugcagcu

SEQ ID NO: 9607 - RNA, 21 nt, Artificial Sequence
  Synthetic
ucccucuccaggggcugccuu

SEQ ID NO: 9608 - RNA, 21 nt, Artificial Sequence
  Synthetic
ucuccaggggcugccuugcag

SEQ ID NO: 9609 - RNA, 21 nt, Artificial Sequence
  Synthetic
ugcagcuccaugacauuggca

SEQ ID NO: 9610 - RNA, 21 nt, Artificial Sequence
  Synthetic
ugccaaugucauggagcugca

SEQ ID NO: 9611 - RNA, 21 nt, Artificial Sequence
  Synthetic
ugccuugcagcuccaugacau

SEQ ID NO: 9612 - RNA, 21 nt, Artificial Sequence
  Synthetic
uggagcugcaaggcagccccu

SEQ ID NO: 9613 - RNA, 21 nt, Artificial Sequence
  Synthetic
ugucauggagcugcaaggcag

SEQ ID NO: 9614 - RNA, 21 nt, Artificial Sequence
  Synthetic
uugcagcuccaugacauuggc

SEQ ID NO: 9615 - RNA, 22 nt, Artificial Sequence
  Synthetic
aaugucauggagcugcaaggca

SEQ ID NO: 9616 - RNA, 22 nt, Artificial Sequence
  Synthetic
acgaugccaaugucauggagcu

SEQ ID NO: 9617 - RNA, 22 nt, Artificial Sequence
  Synthetic
agcuccaugacauuggcaucgu

SEQ ID NO: 9618 - RNA, 22 nt, Artificial Sequence
  Synthetic
agcugcaaggcagccccuggag

SEQ ID NO: 9619 - RNA, 22 nt, Artificial Sequence
  Synthetic
aggggcugccuugcagcuccau

SEQ ID NO: 9620 - RNA, 22 nt, Artificial Sequence
  Synthetic
agucacgaugccaaugucaugg

SEQ ID NO: 9621 - RNA, 22 nt, Artificial Sequence
  Synthetic
augccaaugucauggagcugca

SEQ ID NO: 9622 - RNA, 22 nt, Artificial Sequence
  Synthetic
auggagcugcaaggcagccccu

SEQ ID NO: 9623 - RNA, 22 nt, Artificial Sequence
  Synthetic
augucauggagcugcaaggcag

SEQ ID NO: 9624 - RNA, 22 nt, Artificial Sequence
  Synthetic
caaugucauggagcugcaaggc

SEQ ID NO: 9625 - RNA, 22 nt, Artificial Sequence
  Synthetic
cacgaugccaaugucauggagc

SEQ ID NO: 9626 - RNA, 22 nt, Artificial Sequence
  Synthetic
cagcuccaugacauuggcaucg

SEQ ID NO: 9627 - RNA, 22 nt, Artificial Sequence
  Synthetic
caggggcugccuugcagcucca

SEQ ID NO: 9628 - RNA, 22 nt, Artificial Sequence
  Synthetic
cauggagcugcaaggcagcccc

SEQ ID NO: 9629 - RNA, 22 nt, Artificial Sequence
  Synthetic
ccaaugucauggagcugcaagg

SEQ ID NO: 9630 - RNA, 22 nt, Artificial Sequence
  Synthetic
ccaggggcugccuugcagcucc

SEQ ID NO: 9631 - RNA, 22 nt, Artificial Sequence
  Synthetic
cccucuccaggggcugccuugc

SEQ ID NO: 9632 - RNA, 22 nt, Artificial Sequence
  Synthetic
ccucuccaggggcugccuugca

SEQ ID NO: 9633 - RNA, 22 nt, Artificial Sequence
  Synthetic
ccuugcagcuccaugacauugg

SEQ ID NO: 9634 - RNA, 22 nt, Artificial Sequence
  Synthetic
cgaugccaaugucauggagcug

SEQ ID NO: 9635 - RNA, 22 nt, Artificial Sequence
  Synthetic
cuccaggggcugccuugcagcu

SEQ ID NO: 9636 - RNA, 22 nt, Artificial Sequence
  Synthetic
cucuccaggggcugccuugcag

SEQ ID NO: 9637 - RNA, 22 nt, Artificial Sequence
  Synthetic
cugccuugcagcuccaugacau

SEQ ID NO: 9638 - RNA, 22 nt, Artificial Sequence
  Synthetic
cuugcagcuccaugacauuggc

SEQ ID NO: 9639 - RNA, 22 nt, Artificial Sequence
  Synthetic
gagcugcaaggcagccccugga

SEQ ID NO: 9640 - RNA, 22 nt, Artificial Sequence
  Synthetic
gaugccaaugucauggagcugc

SEQ ID NO: 9641 - RNA, 22 nt, Artificial Sequence
  Synthetic
gcagcuccaugacauuggcauc

SEQ ID NO: 9642 - RNA, 22 nt, Artificial Sequence
  Synthetic
gccaaugucauggagcugcaag

SEQ ID NO: 9643 - RNA, 22 nt, Artificial Sequence
  Synthetic
gccuugcagcuccaugacauug

SEQ ID NO: 9644 - RNA, 22 nt, Artificial Sequence
  Synthetic
gcugcaaggcagccccuggaga

SEQ ID NO: 9645 - RNA, 22 nt, Artificial Sequence
  Synthetic
gcugccuugcagcuccaugaca

SEQ ID NO: 9646 - RNA, 22 nt, Artificial Sequence
  Synthetic
ggagcugcaaggcagccccugg

SEQ ID NO: 9647 - RNA, 22 nt, Artificial Sequence
  Synthetic
ggcugccuugcagcuccaugac

SEQ ID NO: 9648 - RNA, 22 nt, Artificial Sequence
  Synthetic
gggcugccuugcagcuccauga

SEQ ID NO: 9649 - RNA, 22 nt, Artificial Sequence
  Synthetic
ggggcugccuugcagcuccaug

SEQ ID NO: 9650 - RNA, 22 nt, Artificial Sequence
  Synthetic
gucacgaugccaaugucaugga

SEQ ID NO: 9651 - RNA, 22 nt, Artificial Sequence
  Synthetic
gucauggagcugcaaggcagcc

SEQ ID NO: 9652 - RNA, 22 nt, Artificial Sequence
  Synthetic
uagucacgaugccaaugucaug

SEQ ID NO: 9653 - RNA, 22 nt, Artificial Sequence
  Synthetic
ucacgaugccaaugucauggag

SEQ ID NO: 9654 - RNA, 22 nt, Artificial Sequence
  Synthetic
ucauggagcugcaaggcagccc

SEQ ID NO: 9655 - RNA, 22 nt, Artificial Sequence
  Synthetic
uccaggggcugccuugcagcuc

SEQ ID NO: 9656 - RNA, 22 nt, Artificial Sequence
  Synthetic
ucccucuccaggggcugccuug

SEQ ID NO: 9657 - RNA, 22 nt, Artificial Sequence
  Synthetic
ucuccaggggcugccuugcagc

SEQ ID NO: 9658 - RNA, 22 nt, Artificial Sequence
  Synthetic
ugcagcuccaugacauuggcau

SEQ ID NO: 9659 - RNA, 22 nt, Artificial Sequence
  Synthetic
ugccaaugucauggagcugcaa

SEQ ID NO: 9660 - RNA, 22 nt, Artificial Sequence
  Synthetic
ugccuugcagcuccaugacauu

SEQ ID NO: 9661 - RNA, 22 nt, Artificial Sequence
  Synthetic
uggagcugcaaggcagccccug

SEQ ID NO: 9662 - RNA, 22 nt, Artificial Sequence
  Synthetic
ugucauggagcugcaaggcagc

SEQ ID NO: 9663 - RNA, 22 nt, Artificial Sequence
  Synthetic
uucccucuccaggggcugccuu

SEQ ID NO: 9664 - RNA, 22 nt, Artificial Sequence
  Synthetic
uugcagcuccaugacauuggca

SEQ ID NO: 9665 - RNA, 20 nt, Artificial Sequence
  Synthetic
aaggcauccccuggagaggg

SEQ ID NO: 9666 - RNA, 20 nt, Artificial Sequence
  Synthetic
aaugucauggaggugcaagg

SEQ ID NO: 9667 - RNA, 20 nt, Artificial Sequence
  Synthetic
aggcauccccuggagaggga

SEQ ID NO: 9668 - RNA, 20 nt, Artificial Sequence
  Synthetic
aggggaugccuugcaccucc

SEQ ID NO: 9669 - RNA, 20 nt, Artificial Sequence
  Synthetic
aggugcaaggcauccccugg

SEQ ID NO: 9670 - RNA, 20 nt, Artificial Sequence
  Synthetic
auccccuggagagggaagaa

SEQ ID NO: 9671 - RNA, 20 nt, Artificial Sequence
  Synthetic
auggaggugcaaggcauccc

SEQ ID NO: 9672 - RNA, 20 nt, Artificial Sequence
  Synthetic
augucauggaggugcaaggc

SEQ ID NO: 9673 - RNA, 20 nt, Artificial Sequence
  Synthetic
auucuucuucccucuccagg

SEQ ID NO: 9674 - RNA, 20 nt, Artificial Sequence
  Synthetic
caaggcauccccuggagagg

SEQ ID NO: 9675 - RNA, 20 nt, Artificial Sequence
  Synthetic
caaugucauggaggugcaag

SEQ ID NO: 9676 - RNA, 20 nt, Artificial Sequence
  Synthetic
caggggaugccuugcaccuc

SEQ ID NO: 9677 - RNA, 20 nt, Artificial Sequence
  Synthetic
cauccccuggagagggaaga

SEQ ID NO: 9678 - RNA, 20 nt, Artificial Sequence
  Synthetic
cauggaggugcaaggcaucc

SEQ ID NO: 9679 - RNA, 20 nt, Artificial Sequence
  Synthetic
cauucuucuucccucuccag

SEQ ID NO: 9680 - RNA, 20 nt, Artificial Sequence
  Synthetic
ccaggggaugccuugcaccu

SEQ ID NO: 9681 - RNA, 20 nt, Artificial Sequence
  Synthetic
cccucuccaggggaugccuu

SEQ ID NO: 9682 - RNA, 20 nt, Artificial Sequence
  Synthetic
ccucuccaggggaugccuug

SEQ ID NO: 9683 - RNA, 20 nt, Artificial Sequence
  Synthetic
cuccaggggaugccuugcac

SEQ ID NO: 9684 - RNA, 20 nt, Artificial Sequence
  Synthetic
cucuccaggggaugccuugc

SEQ ID NO: 9685 - RNA, 20 nt, Artificial Sequence
  Synthetic
cuucccucuccaggggaugc

SEQ ID NO: 9686 - RNA, 20 nt, Artificial Sequence
  Synthetic
cuucuucccucuccagggga

SEQ ID NO: 9687 - RNA, 20 nt, Artificial Sequence
  Synthetic
gaggugcaaggcauccccug

SEQ ID NO: 9688 - RNA, 20 nt, Artificial Sequence
  Synthetic
gaugccuugcaccuccauga

SEQ ID NO: 9689 - RNA, 20 nt, Artificial Sequence
  Synthetic
gcaaggcauccccuggagag

SEQ ID NO: 9690 - RNA, 20 nt, Artificial Sequence
  Synthetic
gcauccccuggagagggaag

SEQ ID NO: 9691 - RNA, 20 nt, Artificial Sequence
  Synthetic
ggaggugcaaggcauccccu

SEQ ID NO: 9692 - RNA, 20 nt, Artificial Sequence
  Synthetic
ggaugccuugcaccuccaug

SEQ ID NO: 9693 - RNA, 20 nt, Artificial Sequence
  Synthetic
ggcauccccuggagagggaa

SEQ ID NO: 9694 - RNA, 20 nt, Artificial Sequence
  Synthetic
gggaugccuugcaccuccau

SEQ ID NO: 9695 - RNA, 20 nt, Artificial Sequence
  Synthetic
ggggaugccuugcaccucca

SEQ ID NO: 9696 - RNA, 20 nt, Artificial Sequence
  Synthetic
ggugcaaggcauccccugga

SEQ ID NO: 9697 - RNA, 20 nt, Artificial Sequence
  Synthetic
gucauggaggugcaaggcau

SEQ ID NO: 9698 - RNA, 20 nt, Artificial Sequence
  Synthetic
gugcaaggcauccccuggag

SEQ ID NO: 9699 - RNA, 20 nt, Artificial Sequence
  Synthetic
ucauggaggugcaaggcauc

SEQ ID NO: 9700 - RNA, 20 nt, Artificial Sequence
  Synthetic
uccaggggaugccuugcacc

SEQ ID NO: 9701 - RNA, 20 nt, Artificial Sequence
  Synthetic
ucccucuccaggggaugccu

SEQ ID NO: 9702 - RNA, 20 nt, Artificial Sequence
  Synthetic
ucuccaggggaugccuugca

SEQ ID NO: 9703 - RNA, 20 nt, Artificial Sequence
  Synthetic
ucuucccucuccaggggaug

SEQ ID NO: 9704 - RNA, 20 nt, Artificial Sequence
  Synthetic
ucuucuucccucuccagggg

SEQ ID NO: 9705 - RNA, 20 nt, Artificial Sequence
  Synthetic
ugcaaggcauccccuggaga

SEQ ID NO: 9706 - RNA, 20 nt, Artificial Sequence
  Synthetic
uggaggugcaaggcaucccc

SEQ ID NO: 9707 - RNA, 20 nt, Artificial Sequence
  Synthetic
ugucauggaggugcaaggca

SEQ ID NO: 9708 - RNA, 20 nt, Artificial Sequence
  Synthetic
uucccucuccaggggaugcc

SEQ ID NO: 9709 - RNA, 20 nt, Artificial Sequence
  Synthetic
uucuucccucuccaggggau

SEQ ID NO: 9710 - RNA, 20 nt, Artificial Sequence
  Synthetic
uucuucuucccucuccaggg

SEQ ID NO: 9711 - RNA, 21 nt, Artificial Sequence
  Synthetic
aaggcauccccuggagaggga

SEQ ID NO: 9712 - RNA, 21 nt, Artificial Sequence
  Synthetic
aaugucauggaggugcaaggc

SEQ ID NO: 9713 - RNA, 21 nt, Artificial Sequence
  Synthetic
aggcauccccuggagagggaa

SEQ ID NO: 9714 - RNA, 21 nt, Artificial Sequence
  Synthetic
aggggaugccuugcaccucca

SEQ ID NO: 9715 - RNA, 21 nt, Artificial Sequence
  Synthetic
aggugcaaggcauccccugga

SEQ ID NO: 9716 - RNA, 21 nt, Artificial Sequence
  Synthetic
auccccuggagagggaagaag

SEQ ID NO: 9717 - RNA, 21 nt, Artificial Sequence
  Synthetic
auggaggugcaaggcaucccc

SEQ ID NO: 9718 - RNA, 21 nt, Artificial Sequence
  Synthetic
augucauggaggugcaaggca

SEQ ID NO: 9719 - RNA, 21 nt, Artificial Sequence
  Synthetic
auucuucuucccucuccaggg

SEQ ID NO: 9720 - RNA, 21 nt, Artificial Sequence
  Synthetic
caaggcauccccuggagaggg

SEQ ID NO: 9721 - RNA, 21 nt, Artificial Sequence
  Synthetic
caaugucauggaggugcaagg

SEQ ID NO: 9722 - RNA, 21 nt, Artificial Sequence
  Synthetic
caggggaugccuugcaccucc

SEQ ID NO: 9723 - RNA, 21 nt, Artificial Sequence
  Synthetic
cauccccuggagagggaagaa

SEQ ID NO: 9724 - RNA, 21 nt, Artificial Sequence
  Synthetic
cauggaggugcaaggcauccc

SEQ ID NO: 9725 - RNA, 21 nt, Artificial Sequence
  Synthetic
cauucuucuucccucuccagg

SEQ ID NO: 9726 - RNA, 21 nt, Artificial Sequence
  Synthetic
ccaaugucauggaggugcaag

SEQ ID NO: 9727 - RNA, 21 nt, Artificial Sequence
  Synthetic
ccaggggaugccuugcaccuc

SEQ ID NO: 9728 - RNA, 21 nt, Artificial Sequence
  Synthetic
ccauucuucuucccucuccag

SEQ ID NO: 9729 - RNA, 21 nt, Artificial Sequence
  Synthetic
cccucuccaggggaugccuug

SEQ ID NO: 9730 - RNA, 21 nt, Artificial Sequence
  Synthetic
ccucuccaggggaugccuugc

SEQ ID NO: 9731 - RNA, 21 nt, Artificial Sequence
  Synthetic
cuccaggggaugccuugcacc

SEQ ID NO: 9732 - RNA, 21 nt, Artificial Sequence
  Synthetic
cucuccaggggaugccuugca

SEQ ID NO: 9733 - RNA, 21 nt, Artificial Sequence
  Synthetic
cuucccucuccaggggaugcc

SEQ ID NO: 9734 - RNA, 21 nt, Artificial Sequence
  Synthetic
cuucuucccucuccaggggau

SEQ ID NO: 9735 - RNA, 21 nt, Artificial Sequence
  Synthetic
gaggugcaaggcauccccugg

SEQ ID NO: 9736 - RNA, 21 nt, Artificial Sequence
  Synthetic
gaugccuugcaccuccaugac

SEQ ID NO: 9737 - RNA, 21 nt, Artificial Sequence
  Synthetic
gcaaggcauccccuggagagg

SEQ ID NO: 9738 - RNA, 21 nt, Artificial Sequence
  Synthetic
gcauccccuggagagggaaga

SEQ ID NO: 9739 - RNA, 21 nt, Artificial Sequence
  Synthetic
ggaggugcaaggcauccccug

SEQ ID NO: 9740 - RNA, 21 nt, Artificial Sequence
  Synthetic
ggaugccuugcaccuccauga

SEQ ID NO: 9741 - RNA, 21 nt, Artificial Sequence
  Synthetic
ggcauccccuggagagggaag

SEQ ID NO: 9742 - RNA, 21 nt, Artificial Sequence
  Synthetic
gggaugccuugcaccuccaug

SEQ ID NO: 9743 - RNA, 21 nt, Artificial Sequence
  Synthetic
ggggaugccuugcaccuccau

SEQ ID NO: 9744 - RNA, 21 nt, Artificial Sequence
  Synthetic
ggugcaaggcauccccuggag

SEQ ID NO: 9745 - RNA, 21 nt, Artificial Sequence
  Synthetic
gucauggaggugcaaggcauc

SEQ ID NO: 9746 - RNA, 21 nt, Artificial Sequence
  Synthetic
gugcaaggcauccccuggaga

SEQ ID NO: 9747 - RNA, 21 nt, Artificial Sequence
  Synthetic
ucauggaggugcaaggcaucc

SEQ ID NO: 9748 - RNA, 21 nt, Artificial Sequence
  Synthetic
uccaggggaugccuugcaccu

SEQ ID NO: 9749 - RNA, 21 nt, Artificial Sequence
  Synthetic
ucccucuccaggggaugccuu

SEQ ID NO: 9750 - RNA, 21 nt, Artificial Sequence
  Synthetic
ucuccaggggaugccuugcac

SEQ ID NO: 9751 - RNA, 21 nt, Artificial Sequence
  Synthetic
ucuucccucuccaggggaugc

SEQ ID NO: 9752 - RNA, 21 nt, Artificial Sequence
  Synthetic
ucuucuucccucuccagggga

SEQ ID NO: 9753 - RNA, 21 nt, Artificial Sequence
  Synthetic
ugcaaggcauccccuggagag

SEQ ID NO: 9754 - RNA, 21 nt, Artificial Sequence
  Synthetic
uggaggugcaaggcauccccu

SEQ ID NO: 9755 - RNA, 21 nt, Artificial Sequence
  Synthetic
ugucauggaggugcaaggcau

SEQ ID NO: 9756 - RNA, 21 nt, Artificial Sequence
  Synthetic
uucccucuccaggggaugccu

SEQ ID NO: 9757 - RNA, 21 nt, Artificial Sequence
  Synthetic
uucuucccucuccaggggaug

SEQ ID NO: 9758 - RNA, 21 nt, Artificial Sequence
  Synthetic
uucuucuucccucuccagggg

SEQ ID NO: 9759 - RNA, 22 nt, Artificial Sequence
  Synthetic
aaggcauccccuggagagggaa

SEQ ID NO: 9760 - RNA, 22 nt, Artificial Sequence
  Synthetic
aaugucauggaggugcaaggca

SEQ ID NO: 9761 - RNA, 22 nt, Artificial Sequence
  Synthetic
accauucuucuucccucuccag

SEQ ID NO: 9762 - RNA, 22 nt, Artificial Sequence
  Synthetic
aggcauccccuggagagggaag

SEQ ID NO: 9763 - RNA, 22 nt, Artificial Sequence
  Synthetic
aggggaugccuugcaccuccau

SEQ ID NO: 9764 - RNA, 22 nt, Artificial Sequence
  Synthetic
aggugcaaggcauccccuggag

SEQ ID NO: 9765 - RNA, 22 nt, Artificial Sequence
  Synthetic
auccccuggagagggaagaaga

SEQ ID NO: 9766 - RNA, 22 nt, Artificial Sequence
  Synthetic
auggaggugcaaggcauccccu

SEQ ID NO: 9767 - RNA, 22 nt, Artificial Sequence
  Synthetic
augucauggaggugcaaggcau

SEQ ID NO: 9768 - RNA, 22 nt, Artificial Sequence
  Synthetic
auucuucuucccucuccagggg

SEQ ID NO: 9769 - RNA, 22 nt, Artificial Sequence
  Synthetic
caaggcauccccuggagaggga

SEQ ID NO: 9770 - RNA, 22 nt, Artificial Sequence
  Synthetic
caaugucauggaggugcaaggc

SEQ ID NO: 9771 - RNA, 22 nt, Artificial Sequence
  Synthetic
caggggaugccuugcaccucca

SEQ ID NO: 9772 - RNA, 22 nt, Artificial Sequence
  Synthetic
cauccccuggagagggaagaag

SEQ ID NO: 9773 - RNA, 22 nt, Artificial Sequence
  Synthetic
cauggaggugcaaggcaucccc

SEQ ID NO: 9774 - RNA, 22 nt, Artificial Sequence
  Synthetic
cauucuucuucccucuccaggg

SEQ ID NO: 9775 - RNA, 22 nt, Artificial Sequence
  Synthetic
ccaaugucauggaggugcaagg

SEQ ID NO: 9776 - RNA, 22 nt, Artificial Sequence
  Synthetic
ccaggggaugccuugcaccucc

SEQ ID NO: 9777 - RNA, 22 nt, Artificial Sequence
  Synthetic
ccauucuucuucccucuccagg

SEQ ID NO: 9778 - RNA, 22 nt, Artificial Sequence
  Synthetic
cccucuccaggggaugccuugc

SEQ ID NO: 9779 - RNA, 22 nt, Artificial Sequence
  Synthetic
ccucuccaggggaugccuugca

SEQ ID NO: 9780 - RNA, 22 nt, Artificial Sequence
  Synthetic
cuccaggggaugccuugcaccu

SEQ ID NO: 9781 - RNA, 22 nt, Artificial Sequence
  Synthetic
cucuccaggggaugccuugcac

SEQ ID NO: 9782 - RNA, 22 nt, Artificial Sequence
  Synthetic
cuucccucuccaggggaugccu

SEQ ID NO: 9783 - RNA, 22 nt, Artificial Sequence
  Synthetic
cuucuucccucuccaggggaug

SEQ ID NO: 9784 - RNA, 22 nt, Artificial Sequence
  Synthetic
gaggugcaaggcauccccugga

SEQ ID NO: 9785 - RNA, 22 nt, Artificial Sequence
  Synthetic
gaugccuugcaccuccaugaca

SEQ ID NO: 9786 - RNA, 22 nt, Artificial Sequence
  Synthetic
gcaaggcauccccuggagaggg

SEQ ID NO: 9787 - RNA, 22 nt, Artificial Sequence
  Synthetic
gcauccccuggagagggaagaa

SEQ ID NO: 9788 - RNA, 22 nt, Artificial Sequence
  Synthetic
gccaaugucauggaggugcaag

SEQ ID NO: 9789 - RNA, 22 nt, Artificial Sequence
  Synthetic
ggaggugcaaggcauccccugg

SEQ ID NO: 9790 - RNA, 22 nt, Artificial Sequence
  Synthetic
ggaugccuugcaccuccaugac

SEQ ID NO: 9791 - RNA, 22 nt, Artificial Sequence
  Synthetic
ggcauccccuggagagggaaga

SEQ ID NO: 9792 - RNA, 22 nt, Artificial Sequence
  Synthetic
gggaugccuugcaccuccauga

SEQ ID NO: 9793 - RNA, 22 nt, Artificial Sequence
  Synthetic
ggggaugccuugcaccuccaug

SEQ ID NO: 9794 - RNA, 22 nt, Artificial Sequence
  Synthetic
ggugcaaggcauccccuggaga

SEQ ID NO: 9795 - RNA, 22 nt, Artificial Sequence
  Synthetic
gucauggaggugcaaggcaucc

SEQ ID NO: 9796 - RNA, 22 nt, Artificial Sequence
  Synthetic
gugcaaggcauccccuggagag

SEQ ID NO: 9797 - RNA, 22 nt, Artificial Sequence
  Synthetic
ucauggaggugcaaggcauccc

SEQ ID NO: 9798 - RNA, 22 nt, Artificial Sequence
  Synthetic
uccaggggaugccuugcaccuc

SEQ ID NO: 9799 - RNA, 22 nt, Artificial Sequence
  Synthetic
ucccucuccaggggaugccuug

SEQ ID NO: 9800 - RNA, 22 nt, Artificial Sequence
  Synthetic
ucuccaggggaugccuugcacc

SEQ ID NO: 9801 - RNA, 22 nt, Artificial Sequence
  Synthetic
ucuucccucuccaggggaugcc

SEQ ID NO: 9802 - RNA, 22 nt, Artificial Sequence
  Synthetic
ucuucuucccucuccaggggau

SEQ ID NO: 9803 - RNA, 22 nt, Artificial Sequence
  Synthetic
ugcaaggcauccccuggagagg

SEQ ID NO: 9804 - RNA, 22 nt, Artificial Sequence
  Synthetic
uggaggugcaaggcauccccug

SEQ ID NO: 9805 - RNA, 22 nt, Artificial Sequence
  Synthetic
ugucauggaggugcaaggcauc

SEQ ID NO: 9806 - RNA, 22 nt, Artificial Sequence
  Synthetic
uucccucuccaggggaugccuu

SEQ ID NO: 9807 - RNA, 22 nt, Artificial Sequence
  Synthetic
uucuucccucuccaggggaugc

SEQ ID NO: 9808 - RNA, 22 nt, Artificial Sequence
  Synthetic
uucuucuucccucuccagggga

SEQ ID NO: 9809 - RNA, 20 nt, Artificial Sequence
  Synthetic
aaacacuugacuucucucag

SEQ ID NO: 9810 - RNA, 20 nt, Artificial Sequence
  Synthetic
aacacuugacuucucucagu

SEQ ID NO: 9811 - RNA, 20 nt, Artificial Sequence
  Synthetic
aagcaucucacugagagaag

SEQ ID NO: 9812 - RNA, 20 nt, Artificial Sequence
  Synthetic
acacuugacuucucucagug

SEQ ID NO: 9813 - RNA, 20 nt, Artificial Sequence
  Synthetic
acugagagaagucaaguguu

SEQ ID NO: 9814 - RNA, 20 nt, Artificial Sequence
  Synthetic
acuucucucagugagaugcu

SEQ ID NO: 9815 - RNA, 20 nt, Artificial Sequence
  Synthetic
acuugacuucucucagugag

SEQ ID NO: 9816 - RNA, 20 nt, Artificial Sequence
  Synthetic
agcaucucacugagagaagu

SEQ ID NO: 9817 - RNA, 20 nt, Artificial Sequence
  Synthetic
aggccaagcaucucacugag

SEQ ID NO: 9818 - RNA, 20 nt, Artificial Sequence
  Synthetic
agugagaugcuuggccugga

SEQ ID NO: 9819 - RNA, 20 nt, Artificial Sequence
  Synthetic
aucucacugagagaagucaa

SEQ ID NO: 9820 - RNA, 20 nt, Artificial Sequence
  Synthetic
auuaaacacuugacuucucu

SEQ ID NO: 9821 - RNA, 20 nt, Artificial Sequence
  Synthetic
caagcaucucacugagagaa

SEQ ID NO: 9822 - RNA, 20 nt, Artificial Sequence
  Synthetic
cacugagagaagucaagugu

SEQ ID NO: 9823 - RNA, 20 nt, Artificial Sequence
  Synthetic
cacuugacuucucucaguga

SEQ ID NO: 9824 - RNA, 20 nt, Artificial Sequence
  Synthetic
caggccaagcaucucacuga

SEQ ID NO: 9825 - RNA, 20 nt, Artificial Sequence
  Synthetic
cagugagaugcuuggccugg

SEQ ID NO: 9826 - RNA, 20 nt, Artificial Sequence
  Synthetic
caucucacugagagaaguca

SEQ ID NO: 9827 - RNA, 20 nt, Artificial Sequence
  Synthetic
ccaagcaucucacugagaga

SEQ ID NO: 9828 - RNA, 20 nt, Artificial Sequence
  Synthetic
ccaggccaagcaucucacug

SEQ ID NO: 9829 - RNA, 20 nt, Artificial Sequence
  Synthetic
cucacugagagaagucaagu

SEQ ID NO: 9830 - RNA, 20 nt, Artificial Sequence
  Synthetic
cucagugagaugcuuggccu

SEQ ID NO: 9831 - RNA, 20 nt, Artificial Sequence
  Synthetic
cucucagugagaugcuuggc

SEQ ID NO: 9832 - RNA, 20 nt, Artificial Sequence
  Synthetic
cuucucucagugagaugcuu

SEQ ID NO: 9833 - RNA, 20 nt, Artificial Sequence
  Synthetic
cuugacuucucucagugaga

SEQ ID NO: 9834 - RNA, 20 nt, Artificial Sequence
  Synthetic
cuuuuuccaggccaagcauc

SEQ ID NO: 9835 - RNA, 20 nt, Artificial Sequence
  Synthetic
gacuucucucagugagaugc

SEQ ID NO: 9836 - RNA, 20 nt, Artificial Sequence
  Synthetic
gcaucucacugagagaaguc

SEQ ID NO: 9837 - RNA, 20 nt, Artificial Sequence
  Synthetic
gccaagcaucucacugagag

SEQ ID NO: 9838 - RNA, 20 nt, Artificial Sequence
  Synthetic
ggccaagcaucucacugaga

SEQ ID NO: 9839 - RNA, 20 nt, Artificial Sequence
  Synthetic
uaaacacuugacuucucuca

SEQ ID NO: 9840 - RNA, 20 nt, Artificial Sequence
  Synthetic
uauuaaacacuugacuucuc

SEQ ID NO: 9841 - RNA, 20 nt, Artificial Sequence
  Synthetic
ucacugagagaagucaagug

SEQ ID NO: 9842 - RNA, 20 nt, Artificial Sequence
  Synthetic
ucagugagaugcuuggccug

SEQ ID NO: 9843 - RNA, 20 nt, Artificial Sequence
  Synthetic
uccaggccaagcaucucacu

SEQ ID NO: 9844 - RNA, 20 nt, Artificial Sequence
  Synthetic
ucucacugagagaagucaag

SEQ ID NO: 9845 - RNA, 20 nt, Artificial Sequence
  Synthetic
ucucagugagaugcuuggcc

SEQ ID NO: 9846 - RNA, 20 nt, Artificial Sequence
  Synthetic
ucucucagugagaugcuugg

SEQ ID NO: 9847 - RNA, 20 nt, Artificial Sequence
  Synthetic
ugacuucucucagugagaug

SEQ ID NO: 9848 - RNA, 20 nt, Artificial Sequence
  Synthetic
uuaaacacuugacuucucuc

SEQ ID NO: 9849 - RNA, 20 nt, Artificial Sequence
  Synthetic
uuccaggccaagcaucucac

SEQ ID NO: 9850 - RNA, 20 nt, Artificial Sequence
  Synthetic
uucucucagugagaugcuug

SEQ ID NO: 9851 - RNA, 20 nt, Artificial Sequence
  Synthetic
uugacuucucucagugagau

SEQ ID NO: 9852 - RNA, 20 nt, Artificial Sequence
  Synthetic
uuuccaggccaagcaucuca

SEQ ID NO: 9853 - RNA, 20 nt, Artificial Sequence
  Synthetic
uuuuccaggccaagcaucuc

SEQ ID NO: 9854 - RNA, 20 nt, Artificial Sequence
  Synthetic
uuuuuccaggccaagcaucu

SEQ ID NO: 9855 - RNA, 21 nt, Artificial Sequence
  Synthetic
aaacacuugacuucucucagu

SEQ ID NO: 9856 - RNA, 21 nt, Artificial Sequence
  Synthetic
aacacuugacuucucucagug

SEQ ID NO: 9857 - RNA, 21 nt, Artificial Sequence
  Synthetic
aagcaucucacugagagaagu

SEQ ID NO: 9858 - RNA, 21 nt, Artificial Sequence
  Synthetic
acacuugacuucucucaguga

SEQ ID NO: 9859 - RNA, 21 nt, Artificial Sequence
  Synthetic
acugagagaagucaaguguuu

SEQ ID NO: 9860 - RNA, 21 nt, Artificial Sequence
  Synthetic
acuucucucagugagaugcuu

SEQ ID NO: 9861 - RNA, 21 nt, Artificial Sequence
  Synthetic
acuugacuucucucagugaga

SEQ ID NO: 9862 - RNA, 21 nt, Artificial Sequence
  Synthetic
acuuuuuccaggccaagcauc

SEQ ID NO: 9863 - RNA, 21 nt, Artificial Sequence
  Synthetic
agcaucucacugagagaaguc

SEQ ID NO: 9864 - RNA, 21 nt, Artificial Sequence
  Synthetic
aggccaagcaucucacugaga

SEQ ID NO: 9865 - RNA, 21 nt, Artificial Sequence
  Synthetic
agugagaugcuuggccuggaa

SEQ ID NO: 9866 - RNA, 21 nt, Artificial Sequence
  Synthetic
auauuaaacacuugacuucuc

SEQ ID NO: 9867 - RNA, 21 nt, Artificial Sequence
  Synthetic
aucucacugagagaagucaag

SEQ ID NO: 9868 - RNA, 21 nt, Artificial Sequence
  Synthetic
auuaaacacuugacuucucuc

SEQ ID NO: 9869 - RNA, 21 nt, Artificial Sequence
  Synthetic
caagcaucucacugagagaag

SEQ ID NO: 9870 - RNA, 21 nt, Artificial Sequence
  Synthetic
cacugagagaagucaaguguu

SEQ ID NO: 9871 - RNA, 21 nt, Artificial Sequence
  Synthetic
cacuugacuucucucagugag

SEQ ID NO: 9872 - RNA, 21 nt, Artificial Sequence
  Synthetic
caggccaagcaucucacugag

SEQ ID NO: 9873 - RNA, 21 nt, Artificial Sequence
  Synthetic
cagugagaugcuuggccugga

SEQ ID NO: 9874 - RNA, 21 nt, Artificial Sequence
  Synthetic
caucucacugagagaagucaa

SEQ ID NO: 9875 - RNA, 21 nt, Artificial Sequence
  Synthetic
ccaagcaucucacugagagaa

SEQ ID NO: 9876 - RNA, 21 nt, Artificial Sequence
  Synthetic
ccaggccaagcaucucacuga

SEQ ID NO: 9877 - RNA, 21 nt, Artificial Sequence
  Synthetic
cucacugagagaagucaagug

SEQ ID NO: 9878 - RNA, 21 nt, Artificial Sequence
  Synthetic
cucagugagaugcuuggccug

SEQ ID NO: 9879 - RNA, 21 nt, Artificial Sequence
  Synthetic
cucucagugagaugcuuggcc

SEQ ID NO: 9880 - RNA, 21 nt, Artificial Sequence
  Synthetic
cuucucucagugagaugcuug

SEQ ID NO: 9881 - RNA, 21 nt, Artificial Sequence
  Synthetic
cuugacuucucucagugagau

SEQ ID NO: 9882 - RNA, 21 nt, Artificial Sequence
  Synthetic
cuuuuuccaggccaagcaucu

SEQ ID NO: 9883 - RNA, 21 nt, Artificial Sequence
  Synthetic
gacuucucucagugagaugcu

SEQ ID NO: 9884 - RNA, 21 nt, Artificial Sequence
  Synthetic
gcaucucacugagagaaguca

SEQ ID NO: 9885 - RNA, 21 nt, Artificial Sequence
  Synthetic
gccaagcaucucacugagaga

SEQ ID NO: 9886 - RNA, 21 nt, Artificial Sequence
  Synthetic
ggccaagcaucucacugagag

SEQ ID NO: 9887 - RNA, 21 nt, Artificial Sequence
  Synthetic
uaaacacuugacuucucucag

SEQ ID NO: 9888 - RNA, 21 nt, Artificial Sequence
  Synthetic
uauuaaacacuugacuucucu

SEQ ID NO: 9889 - RNA, 21 nt, Artificial Sequence
  Synthetic
ucacugagagaagucaagugu

SEQ ID NO: 9890 - RNA, 21 nt, Artificial Sequence
  Synthetic
ucagugagaugcuuggccugg

SEQ ID NO: 9891 - RNA, 21 nt, Artificial Sequence
  Synthetic
uccaggccaagcaucucacug

SEQ ID NO: 9892 - RNA, 21 nt, Artificial Sequence
  Synthetic
ucucacugagagaagucaagu

SEQ ID NO: 9893 - RNA, 21 nt, Artificial Sequence
  Synthetic
ucucagugagaugcuuggccu

SEQ ID NO: 9894 - RNA, 21 nt, Artificial Sequence
  Synthetic
ucucucagugagaugcuuggc

SEQ ID NO: 9895 - RNA, 21 nt, Artificial Sequence
  Synthetic
ugacuucucucagugagaugc

SEQ ID NO: 9896 - RNA, 21 nt, Artificial Sequence
  Synthetic
uuaaacacuugacuucucuca

SEQ ID NO: 9897 - RNA, 21 nt, Artificial Sequence
  Synthetic
uuccaggccaagcaucucacu

SEQ ID NO: 9898 - RNA, 21 nt, Artificial Sequence
  Synthetic
uucucucagugagaugcuugg

SEQ ID NO: 9899 - RNA, 21 nt, Artificial Sequence
  Synthetic
uugacuucucucagugagaug

SEQ ID NO: 9900 - RNA, 21 nt, Artificial Sequence
  Synthetic
uuuccaggccaagcaucucac

SEQ ID NO: 9901 - RNA, 21 nt, Artificial Sequence
  Synthetic
uuuuccaggccaagcaucuca

SEQ ID NO: 9902 - RNA, 21 nt, Artificial Sequence
  Synthetic
uuuuuccaggccaagcaucuc

SEQ ID NO: 9903 - RNA, 22 nt, Artificial Sequence
  Synthetic
aaacacuugacuucucucagug

SEQ ID NO: 9904 - RNA, 22 nt, Artificial Sequence
  Synthetic
aacacuugacuucucucaguga

SEQ ID NO: 9905 - RNA, 22 nt, Artificial Sequence
  Synthetic
aagcaucucacugagagaaguc

SEQ ID NO: 9906 - RNA, 22 nt, Artificial Sequence
  Synthetic
aauauuaaacacuugacuucuc

SEQ ID NO: 9907 - RNA, 22 nt, Artificial Sequence
  Synthetic
acacuugacuucucucagugag

SEQ ID NO: 9908 - RNA, 22 nt, Artificial Sequence
  Synthetic
acugagagaagucaaguguuua

SEQ ID NO: 9909 - RNA, 22 nt, Artificial Sequence
  Synthetic
acuucucucagugagaugcuug

SEQ ID NO: 9910 - RNA, 22 nt, Artificial Sequence
  Synthetic
acuugacuucucucagugagau

SEQ ID NO: 9911 - RNA, 22 nt, Artificial Sequence
  Synthetic
acuuuuuccaggccaagcaucu

SEQ ID NO: 9912 - RNA, 22 nt, Artificial Sequence
  Synthetic
agcaucucacugagagaaguca

SEQ ID NO: 9913 - RNA, 22 nt, Artificial Sequence
  Synthetic
aggccaagcaucucacugagag

SEQ ID NO: 9914 - RNA, 22 nt, Artificial Sequence
  Synthetic
agugagaugcuuggccuggaaa

SEQ ID NO: 9915 - RNA, 22 nt, Artificial Sequence
  Synthetic
auauuaaacacuugacuucucu

SEQ ID NO: 9916 - RNA, 22 nt, Artificial Sequence
  Synthetic
aucucacugagagaagucaagu

SEQ ID NO: 9917 - RNA, 22 nt, Artificial Sequence
  Synthetic
auuaaacacuugacuucucuca

SEQ ID NO: 9918 - RNA, 22 nt, Artificial Sequence
  Synthetic
caagcaucucacugagagaagu

SEQ ID NO: 9919 - RNA, 22 nt, Artificial Sequence
  Synthetic
cacugagagaagucaaguguuu

SEQ ID NO: 9920 - RNA, 22 nt, Artificial Sequence
  Synthetic
cacuugacuucucucagugaga

SEQ ID NO: 9921 - RNA, 22 nt, Artificial Sequence
  Synthetic
cacuuuuuccaggccaagcauc

SEQ ID NO: 9922 - RNA, 22 nt, Artificial Sequence
  Synthetic
caggccaagcaucucacugaga

SEQ ID NO: 9923 - RNA, 22 nt, Artificial Sequence
  Synthetic
cagugagaugcuuggccuggaa

SEQ ID NO: 9924 - RNA, 22 nt, Artificial Sequence
  Synthetic
caucucacugagagaagucaag

SEQ ID NO: 9925 - RNA, 22 nt, Artificial Sequence
  Synthetic
ccaagcaucucacugagagaag

SEQ ID NO: 9926 - RNA, 22 nt, Artificial Sequence
  Synthetic
ccaggccaagcaucucacugag

SEQ ID NO: 9927 - RNA, 22 nt, Artificial Sequence
  Synthetic
cucacugagagaagucaagugu

SEQ ID NO: 9928 - RNA, 22 nt, Artificial Sequence
  Synthetic
cucagugagaugcuuggccugg

SEQ ID NO: 9929 - RNA, 22 nt, Artificial Sequence
  Synthetic
cucucagugagaugcuuggccu

SEQ ID NO: 9930 - RNA, 22 nt, Artificial Sequence
  Synthetic
cuucucucagugagaugcuugg

SEQ ID NO: 9931 - RNA, 22 nt, Artificial Sequence
  Synthetic
cuugacuucucucagugagaug

SEQ ID NO: 9932 - RNA, 22 nt, Artificial Sequence
  Synthetic
cuuuuuccaggccaagcaucuc

SEQ ID NO: 9933 - RNA, 22 nt, Artificial Sequence
  Synthetic
gacuucucucagugagaugcuu

SEQ ID NO: 9934 - RNA, 22 nt, Artificial Sequence
  Synthetic
gcaucucacugagagaagucaa

SEQ ID NO: 9935 - RNA, 22 nt, Artificial Sequence
  Synthetic
gccaagcaucucacugagagaa

SEQ ID NO: 9936 - RNA, 22 nt, Artificial Sequence
  Synthetic
ggccaagcaucucacugagaga

SEQ ID NO: 9937 - RNA, 22 nt, Artificial Sequence
  Synthetic
uaaacacuugacuucucucagu

SEQ ID NO: 9938 - RNA, 22 nt, Artificial Sequence
  Synthetic
uauuaaacacuugacuucucuc

SEQ ID NO: 9939 - RNA, 22 nt, Artificial Sequence
  Synthetic
ucacugagagaagucaaguguu

SEQ ID NO: 9940 - RNA, 22 nt, Artificial Sequence
  Synthetic
ucagugagaugcuuggccugga

SEQ ID NO: 9941 - RNA, 22 nt, Artificial Sequence
  Synthetic
uccaggccaagcaucucacuga

SEQ ID NO: 9942 - RNA, 22 nt, Artificial Sequence
  Synthetic
ucucacugagagaagucaagug

SEQ ID NO: 9943 - RNA, 22 nt, Artificial Sequence
  Synthetic
ucucagugagaugcuuggccug

SEQ ID NO: 9944 - RNA, 22 nt, Artificial Sequence
  Synthetic
ucucucagugagaugcuuggcc

SEQ ID NO: 9945 - RNA, 22 nt, Artificial Sequence
  Synthetic
ugacuucucucagugagaugcu

SEQ ID NO: 9946 - RNA, 22 nt, Artificial Sequence
  Synthetic
uuaaacacuugacuucucucag

SEQ ID NO: 9947 - RNA, 22 nt, Artificial Sequence
  Synthetic
uuccaggccaagcaucucacug

SEQ ID NO: 9948 - RNA, 22 nt, Artificial Sequence
  Synthetic
uucucucagugagaugcuuggc

SEQ ID NO: 9949 - RNA, 22 nt, Artificial Sequence
  Synthetic
uugacuucucucagugagaugc

SEQ ID NO: 9950 - RNA, 22 nt, Artificial Sequence
  Synthetic
uuuccaggccaagcaucucacu

SEQ ID NO: 9951 - RNA, 22 nt, Artificial Sequence
  Synthetic
uuuuccaggccaagcaucucac

SEQ ID NO: 9952 - RNA, 22 nt, Artificial Sequence
  Synthetic
uuuuuccaggccaagcaucuca

SEQ ID NO: 9953 - RNA, 20 nt, Artificial Sequence
  Synthetic
aaugagaggcucaugaugcu

SEQ ID NO: 9954 - RNA, 20 nt, Artificial Sequence
  Synthetic
agaggcucaugaugcucaaa

SEQ ID NO: 9955 - RNA, 20 nt, Artificial Sequence
  Synthetic
agcaucaugagccucucauu

SEQ ID NO: 9956 - RNA, 20 nt, Artificial Sequence
  Synthetic
agcgauuuugagcaucauga

SEQ ID NO: 9957 - RNA, 20 nt, Artificial Sequence
  Synthetic
aggcucaugaugcucaaaau

SEQ ID NO: 9958 - RNA, 20 nt, Artificial Sequence
  Synthetic
aucucagcgauuuugagcau

SEQ ID NO: 9959 - RNA, 20 nt, Artificial Sequence
  Synthetic
augagaggcucaugaugcuc

SEQ ID NO: 9960 - RNA, 20 nt, Artificial Sequence
  Synthetic
augaugcucaaaaucgcuga

SEQ ID NO: 9961 - RNA, 20 nt, Artificial Sequence
  Synthetic
augcucaaaaucgcugagau

SEQ ID NO: 9962 - RNA, 20 nt, Artificial Sequence
  Synthetic
auuuugagcaucaugagccu

SEQ ID NO: 9963 - RNA, 20 nt, Artificial Sequence
  Synthetic
caaugagaggcucaugaugc

SEQ ID NO: 9964 - RNA, 20 nt, Artificial Sequence
  Synthetic
cagcgauuuugagcaucaug

SEQ ID NO: 9965 - RNA, 20 nt, Artificial Sequence
  Synthetic
caucaugagccucucauugg

SEQ ID NO: 9966 - RNA, 20 nt, Artificial Sequence
  Synthetic
caucucagcgauuuugagca

SEQ ID NO: 9967 - RNA, 20 nt, Artificial Sequence
  Synthetic
caugaugcucaaaaucgcug

SEQ ID NO: 9968 - RNA, 20 nt, Artificial Sequence
  Synthetic
ccaaugagaggcucaugaug

SEQ ID NO: 9969 - RNA, 20 nt, Artificial Sequence
  Synthetic
ccuucaucucagcgauuuug

SEQ ID NO: 9970 - RNA, 20 nt, Artificial Sequence
  Synthetic
cgauuuugagcaucaugagc

SEQ ID NO: 9971 - RNA, 20 nt, Artificial Sequence
  Synthetic
cucagcgauuuugagcauca

SEQ ID NO: 9972 - RNA, 20 nt, Artificial Sequence
  Synthetic
cucaugaugcucaaaaucgc

SEQ ID NO: 9973 - RNA, 20 nt, Artificial Sequence
  Synthetic
cuggccaaugagaggcucau

SEQ ID NO: 9974 - RNA, 20 nt, Artificial Sequence
  Synthetic
cuucaucucagcgauuuuga

SEQ ID NO: 9975 - RNA, 20 nt, Artificial Sequence
  Synthetic
gagaggcucaugaugcucaa

SEQ ID NO: 9976 - RNA, 20 nt, Artificial Sequence
  Synthetic
gagcaucaugagccucucau

SEQ ID NO: 9977 - RNA, 20 nt, Artificial Sequence
  Synthetic
gaggcucaugaugcucaaaa

SEQ ID NO: 9978 - RNA, 20 nt, Artificial Sequence
  Synthetic
gaugcucaaaaucgcugaga

SEQ ID NO: 9979 - RNA, 20 nt, Artificial Sequence
  Synthetic
gauuuugagcaucaugagcc

SEQ ID NO: 9980 - RNA, 20 nt, Artificial Sequence
  Synthetic
gcaucaugagccucucauug

SEQ ID NO: 9981 - RNA, 20 nt, Artificial Sequence
  Synthetic
gccaaugagaggcucaugau

SEQ ID NO: 9982 - RNA, 20 nt, Artificial Sequence
  Synthetic
gcgauuuugagcaucaugag

SEQ ID NO: 9983 - RNA, 20 nt, Artificial Sequence
  Synthetic
gcucaugaugcucaaaaucg

SEQ ID NO: 9984 - RNA, 20 nt, Artificial Sequence
  Synthetic
gcuggccaaugagaggcuca

SEQ ID NO: 9985 - RNA, 20 nt, Artificial Sequence
  Synthetic
ggccaaugagaggcucauga

SEQ ID NO: 9986 - RNA, 20 nt, Artificial Sequence
  Synthetic
ggcucaugaugcucaaaauc

SEQ ID NO: 9987 - RNA, 20 nt, Artificial Sequence
  Synthetic
ucagcgauuuugagcaucau

SEQ ID NO: 9988 - RNA, 20 nt, Artificial Sequence
  Synthetic
ucaucucagcgauuuugagc

SEQ ID NO: 9989 - RNA, 20 nt, Artificial Sequence
  Synthetic
ucaugaugcucaaaaucgcu

SEQ ID NO: 9990 - RNA, 20 nt, Artificial Sequence
  Synthetic
ucucagcgauuuugagcauc

SEQ ID NO: 9991 - RNA, 20 nt, Artificial Sequence
  Synthetic
ugagaggcucaugaugcuca

SEQ ID NO: 9992 - RNA, 20 nt, Artificial Sequence
  Synthetic
ugagcaucaugagccucuca

SEQ ID NO: 9993 - RNA, 20 nt, Artificial Sequence
  Synthetic
ugaugcucaaaaucgcugag

SEQ ID NO: 9994 - RNA, 20 nt, Artificial Sequence
  Synthetic
uggccaaugagaggcucaug

SEQ ID NO: 9995 - RNA, 20 nt, Artificial Sequence
  Synthetic
uucaucucagcgauuuugag

SEQ ID NO: 9996 - RNA, 20 nt, Artificial Sequence
  Synthetic
uugagcaucaugagccucuc

SEQ ID NO: 9997 - RNA, 20 nt, Artificial Sequence
  Synthetic
uuugagcaucaugagccucu

SEQ ID NO: 9998 - RNA, 20 nt, Artificial Sequence
  Synthetic
uuuugagcaucaugagccuc

SEQ ID NO: 9999 - RNA, 21 nt, Artificial Sequence
  Synthetic
aaugagaggcucaugaugcuc

SEQ ID NO: 10000 - RNA, 21 nt, Artificial Sequence
  Synthetic
agaggcucaugaugcucaaaa

SEQ ID NO: 10001 - RNA, 21 nt, Artificial Sequence
  Synthetic
agcaucaugagccucucauug

SEQ ID NO: 10002 - RNA, 21 nt, Artificial Sequence
  Synthetic
agcgauuuugagcaucaugag

SEQ ID NO: 10003 - RNA, 21 nt, Artificial Sequence
  Synthetic
agcuggccaaugagaggcuca

SEQ ID NO: 10004 - RNA, 21 nt, Artificial Sequence
  Synthetic
aggcucaugaugcucaaaauc

SEQ ID NO: 10005 - RNA, 21 nt, Artificial Sequence
  Synthetic
aucucagcgauuuugagcauc

SEQ ID NO: 10006 - RNA, 21 nt, Artificial Sequence
  Synthetic
augagaggcucaugaugcuca

SEQ ID NO: 10007 - RNA, 21 nt, Artificial Sequence
  Synthetic
augaugcucaaaaucgcugag

SEQ ID NO: 10008 - RNA, 21 nt, Artificial Sequence
  Synthetic
augcucaaaaucgcugagaug

SEQ ID NO: 10009 - RNA, 21 nt, Artificial Sequence
  Synthetic
auuuugagcaucaugagccuc

SEQ ID NO: 10010 - RNA, 21 nt, Artificial Sequence
  Synthetic
caaugagaggcucaugaugcu

SEQ ID NO: 10011 - RNA, 21 nt, Artificial Sequence
  Synthetic
cagcgauuuugagcaucauga

SEQ ID NO: 10012 - RNA, 21 nt, Artificial Sequence
  Synthetic
caucaugagccucucauuggc

SEQ ID NO: 10013 - RNA, 21 nt, Artificial Sequence
  Synthetic
caucucagcgauuuugagcau

SEQ ID NO: 10014 - RNA, 21 nt, Artificial Sequence
  Synthetic
caugaugcucaaaaucgcuga

SEQ ID NO: 10015 - RNA, 21 nt, Artificial Sequence
  Synthetic
ccaaugagaggcucaugaugc

SEQ ID NO: 10016 - RNA, 21 nt, Artificial Sequence
  Synthetic
ccuucaucucagcgauuuuga

SEQ ID NO: 10017 - RNA, 21 nt, Artificial Sequence
  Synthetic
cgauuuugagcaucaugagcc

SEQ ID NO: 10018 - RNA, 21 nt, Artificial Sequence
  Synthetic
cucagcgauuuugagcaucau

SEQ ID NO: 10019 - RNA, 21 nt, Artificial Sequence
  Synthetic
cucaugaugcucaaaaucgcu

SEQ ID NO: 10020 - RNA, 21 nt, Artificial Sequence
  Synthetic
cuggccaaugagaggcucaug

SEQ ID NO: 10021 - RNA, 21 nt, Artificial Sequence
  Synthetic
cuucaucucagcgauuuugag

SEQ ID NO: 10022 - RNA, 21 nt, Artificial Sequence
  Synthetic
gagaggcucaugaugcucaaa

SEQ ID NO: 10023 - RNA, 21 nt, Artificial Sequence
  Synthetic
gagcaucaugagccucucauu

SEQ ID NO: 10024 - RNA, 21 nt, Artificial Sequence
  Synthetic
gaggcucaugaugcucaaaau

SEQ ID NO: 10025 - RNA, 21 nt, Artificial Sequence
  Synthetic
gaugcucaaaaucgcugagau

SEQ ID NO: 10026 - RNA, 21 nt, Artificial Sequence
  Synthetic
gauuuugagcaucaugagccu

SEQ ID NO: 10027 - RNA, 21 nt, Artificial Sequence
  Synthetic
gcaucaugagccucucauugg

SEQ ID NO: 10028 - RNA, 21 nt, Artificial Sequence
  Synthetic
gccaaugagaggcucaugaug

SEQ ID NO: 10029 - RNA, 21 nt, Artificial Sequence
  Synthetic
gcgauuuugagcaucaugagc

SEQ ID NO: 10030 - RNA, 21 nt, Artificial Sequence
  Synthetic
gcucaugaugcucaaaaucgc

SEQ ID NO: 10031 - RNA, 21 nt, Artificial Sequence
  Synthetic
gcuggccaaugagaggcucau

SEQ ID NO: 10032 - RNA, 21 nt, Artificial Sequence
  Synthetic
ggccaaugagaggcucaugau

SEQ ID NO: 10033 - RNA, 21 nt, Artificial Sequence
  Synthetic
ggcucaugaugcucaaaaucg

SEQ ID NO: 10034 - RNA, 21 nt, Artificial Sequence
  Synthetic
ucagcgauuuugagcaucaug

SEQ ID NO: 10035 - RNA, 21 nt, Artificial Sequence
  Synthetic
ucaucucagcgauuuugagca

SEQ ID NO: 10036 - RNA, 21 nt, Artificial Sequence
  Synthetic
ucaugaugcucaaaaucgcug

SEQ ID NO: 10037 - RNA, 21 nt, Artificial Sequence
  Synthetic
uccuucaucucagcgauuuug

SEQ ID NO: 10038 - RNA, 21 nt, Artificial Sequence
  Synthetic
ucucagcgauuuugagcauca

SEQ ID NO: 10039 - RNA, 21 nt, Artificial Sequence
  Synthetic
ugagaggcucaugaugcucaa

SEQ ID NO: 10040 - RNA, 21 nt, Artificial Sequence
  Synthetic
ugagcaucaugagccucucau

SEQ ID NO: 10041 - RNA, 21 nt, Artificial Sequence
  Synthetic
ugaugcucaaaaucgcugaga

SEQ ID NO: 10042 - RNA, 21 nt, Artificial Sequence
  Synthetic
uggccaaugagaggcucauga

SEQ ID NO: 10043 - RNA, 21 nt, Artificial Sequence
  Synthetic
uucaucucagcgauuuugagc

SEQ ID NO: 10044 - RNA, 21 nt, Artificial Sequence
  Synthetic
uugagcaucaugagccucuca

SEQ ID NO: 10045 - RNA, 21 nt, Artificial Sequence
  Synthetic
uuugagcaucaugagccucuc

SEQ ID NO: 10046 - RNA, 21 nt, Artificial Sequence
  Synthetic
uuuugagcaucaugagccucu

SEQ ID NO: 10047 - RNA, 22 nt, Artificial Sequence
  Synthetic
aaugagaggcucaugaugcuca

SEQ ID NO: 10048 - RNA, 22 nt, Artificial Sequence
  Synthetic
agaggcucaugaugcucaaaau

SEQ ID NO: 10049 - RNA, 22 nt, Artificial Sequence
  Synthetic
agcaucaugagccucucauugg

SEQ ID NO: 10050 - RNA, 22 nt, Artificial Sequence
  Synthetic
agcgauuuugagcaucaugagc

SEQ ID NO: 10051 - RNA, 22 nt, Artificial Sequence
  Synthetic
agcuggccaaugagaggcucau

SEQ ID NO: 10052 - RNA, 22 nt, Artificial Sequence
  Synthetic
aggcucaugaugcucaaaaucg

SEQ ID NO: 10053 - RNA, 22 nt, Artificial Sequence
  Synthetic
aucucagcgauuuugagcauca

SEQ ID NO: 10054 - RNA, 22 nt, Artificial Sequence
  Synthetic
augagaggcucaugaugcucaa

SEQ ID NO: 10055 - RNA, 22 nt, Artificial Sequence
  Synthetic
augaugcucaaaaucgcugaga

SEQ ID NO: 10056 - RNA, 22 nt, Artificial Sequence
  Synthetic
augcucaaaaucgcugagauga

SEQ ID NO: 10057 - RNA, 22 nt, Artificial Sequence
  Synthetic
auuuugagcaucaugagccucu

SEQ ID NO: 10058 - RNA, 22 nt, Artificial Sequence
  Synthetic
caaugagaggcucaugaugcuc

SEQ ID NO: 10059 - RNA, 22 nt, Artificial Sequence
  Synthetic
cagcgauuuugagcaucaugag

SEQ ID NO: 10060 - RNA, 22 nt, Artificial Sequence
  Synthetic
caucaugagccucucauuggcc

SEQ ID NO: 10061 - RNA, 22 nt, Artificial Sequence
  Synthetic
caucucagcgauuuugagcauc

SEQ ID NO: 10062 - RNA, 22 nt, Artificial Sequence
  Synthetic
caugaugcucaaaaucgcugag

SEQ ID NO: 10063 - RNA, 22 nt, Artificial Sequence
  Synthetic
ccaaugagaggcucaugaugcu

SEQ ID NO: 10064 - RNA, 22 nt, Artificial Sequence
  Synthetic
ccuucaucucagcgauuuugag

SEQ ID NO: 10065 - RNA, 22 nt, Artificial Sequence
  Synthetic
cgauuuugagcaucaugagccu

SEQ ID NO: 10066 - RNA, 22 nt, Artificial Sequence
  Synthetic
cucagcgauuuugagcaucaug

SEQ ID NO: 10067 - RNA, 22 nt, Artificial Sequence
  Synthetic
cucaugaugcucaaaaucgcug

SEQ ID NO: 10068 - RNA, 22 nt, Artificial Sequence
  Synthetic
cuccuucaucucagcgauuuug

SEQ ID NO: 10069 - RNA, 22 nt, Artificial Sequence
  Synthetic
cuggccaaugagaggcucauga

SEQ ID NO: 10070 - RNA, 22 nt, Artificial Sequence
  Synthetic
cuucaucucagcgauuuugagc

SEQ ID NO: 10071 - RNA, 22 nt, Artificial Sequence
  Synthetic
gagaggcucaugaugcucaaaa

SEQ ID NO: 10072 - RNA, 22 nt, Artificial Sequence
  Synthetic
gagcaucaugagccucucauug

SEQ ID NO: 10073 - RNA, 22 nt, Artificial Sequence
  Synthetic
gagcuggccaaugagaggcuca

SEQ ID NO: 10074 - RNA, 22 nt, Artificial Sequence
  Synthetic
gaggcucaugaugcucaaaauc

SEQ ID NO: 10075 - RNA, 22 nt, Artificial Sequence
  Synthetic
gaugcucaaaaucgcugagaug

SEQ ID NO: 10076 - RNA, 22 nt, Artificial Sequence
  Synthetic
gauuuugagcaucaugagccuc

SEQ ID NO: 10077 - RNA, 22 nt, Artificial Sequence
  Synthetic
gcaucaugagccucucauuggc

SEQ ID NO: 10078 - RNA, 22 nt, Artificial Sequence
  Synthetic
gccaaugagaggcucaugaugc

SEQ ID NO: 10079 - RNA, 22 nt, Artificial Sequence
  Synthetic
gcgauuuugagcaucaugagcc

SEQ ID NO: 10080 - RNA, 22 nt, Artificial Sequence
  Synthetic
gcucaugaugcucaaaaucgcu

SEQ ID NO: 10081 - RNA, 22 nt, Artificial Sequence
  Synthetic
gcuggccaaugagaggcucaug

SEQ ID NO: 10082 - RNA, 22 nt, Artificial Sequence
  Synthetic
ggccaaugagaggcucaugaug

SEQ ID NO: 10083 - RNA, 22 nt, Artificial Sequence
  Synthetic
ggcucaugaugcucaaaaucgc

SEQ ID NO: 10084 - RNA, 22 nt, Artificial Sequence
  Synthetic
ucagcgauuuugagcaucauga

SEQ ID NO: 10085 - RNA, 22 nt, Artificial Sequence
  Synthetic
ucaucucagcgauuuugagcau

SEQ ID NO: 10086 - RNA, 22 nt, Artificial Sequence
  Synthetic
ucaugaugcucaaaaucgcuga

SEQ ID NO: 10087 - RNA, 22 nt, Artificial Sequence
  Synthetic
uccuucaucucagcgauuuuga

SEQ ID NO: 10088 - RNA, 22 nt, Artificial Sequence
  Synthetic
ucucagcgauuuugagcaucau

SEQ ID NO: 10089 - RNA, 22 nt, Artificial Sequence
  Synthetic
ugagaggcucaugaugcucaaa

SEQ ID NO: 10090 - RNA, 22 nt, Artificial Sequence
  Synthetic
ugagcaucaugagccucucauu

SEQ ID NO: 10091 - RNA, 22 nt, Artificial Sequence
  Synthetic
ugaugcucaaaaucgcugagau

SEQ ID NO: 10092 - RNA, 22 nt, Artificial Sequence
  Synthetic
uggccaaugagaggcucaugau

SEQ ID NO: 10093 - RNA, 22 nt, Artificial Sequence
  Synthetic
uucaucucagcgauuuugagca

SEQ ID NO: 10094 - RNA, 22 nt, Artificial Sequence
  Synthetic
uugagcaucaugagccucucau

SEQ ID NO: 10095 - RNA, 22 nt, Artificial Sequence
  Synthetic
uuugagcaucaugagccucuca

SEQ ID NO: 10096 - RNA, 22 nt, Artificial Sequence
  Synthetic
uuuugagcaucaugagccucuc

SEQ ID NO: 10097 - RNA, 20 nt, Artificial Sequence
  Synthetic
aaggaggagcuggccaauga

SEQ ID NO: 10098 - RNA, 20 nt, Artificial Sequence
  Synthetic
aaugagagucucaugacgcu

SEQ ID NO: 10099 - RNA, 20 nt, Artificial Sequence
  Synthetic
agacucucauuggccagcuc

SEQ ID NO: 10100 - RNA, 20 nt, Artificial Sequence
  Synthetic
agagucucaugacgcucaaa

SEQ ID NO: 10101 - RNA, 20 nt, Artificial Sequence
  Synthetic
agcgauuuugagcgucauga

SEQ ID NO: 10102 - RNA, 20 nt, Artificial Sequence
  Synthetic
agcgucaugagacucucauu

SEQ ID NO: 10103 - RNA, 20 nt, Artificial Sequence
  Synthetic
agcuggccaaugagagucuc

SEQ ID NO: 10104 - RNA, 20 nt, Artificial Sequence
  Synthetic
aggagcuggccaaugagagu

SEQ ID NO: 10105 - RNA, 20 nt, Artificial Sequence
  Synthetic
aggaggagcuggccaaugag

SEQ ID NO: 10106 - RNA, 20 nt, Artificial Sequence
  Synthetic
agucucaugacgcucaaaau

SEQ ID NO: 10107 - RNA, 20 nt, Artificial Sequence
  Synthetic
augagacucucauuggccag

SEQ ID NO: 10108 - RNA, 20 nt, Artificial Sequence
  Synthetic
augagagucucaugacgcuc

SEQ ID NO: 10109 - RNA, 20 nt, Artificial Sequence
  Synthetic
auuuugagcgucaugagacu

SEQ ID NO: 10110 - RNA, 20 nt, Artificial Sequence
  Synthetic
caaugagagucucaugacgc

SEQ ID NO: 10111 - RNA, 20 nt, Artificial Sequence
  Synthetic
cagcgauuuugagcgucaug

SEQ ID NO: 10112 - RNA, 20 nt, Artificial Sequence
  Synthetic
caugagacucucauuggcca

SEQ ID NO: 10113 - RNA, 20 nt, Artificial Sequence
  Synthetic
ccaaugagagucucaugacg

SEQ ID NO: 10114 - RNA, 20 nt, Artificial Sequence
  Synthetic
cgauuuugagcgucaugaga

SEQ ID NO: 10115 - RNA, 20 nt, Artificial Sequence
  Synthetic
cgucaugagacucucauugg

SEQ ID NO: 10116 - RNA, 20 nt, Artificial Sequence
  Synthetic
cuggccaaugagagucucau

SEQ ID NO: 10117 - RNA, 20 nt, Artificial Sequence
  Synthetic
gacucucauuggccagcucc

SEQ ID NO: 10118 - RNA, 20 nt, Artificial Sequence
  Synthetic
gagacucucauuggccagcu

SEQ ID NO: 10119 - RNA, 20 nt, Artificial Sequence
  Synthetic
gagagucucaugacgcucaa

SEQ ID NO: 10120 - RNA, 20 nt, Artificial Sequence
  Synthetic
gagcgucaugagacucucau

SEQ ID NO: 10121 - RNA, 20 nt, Artificial Sequence
  Synthetic
gagcuggccaaugagagucu

SEQ ID NO: 10122 - RNA, 20 nt, Artificial Sequence
  Synthetic
gaggagcuggccaaugagag

SEQ ID NO: 10123 - RNA, 20 nt, Artificial Sequence
  Synthetic
gagucucaugacgcucaaaa

SEQ ID NO: 10124 - RNA, 20 nt, Artificial Sequence
  Synthetic
gauuuugagcgucaugagac

SEQ ID NO: 10125 - RNA, 20 nt, Artificial Sequence
  Synthetic
gccaaugagagucucaugac

SEQ ID NO: 10126 - RNA, 20 nt, Artificial Sequence
  Synthetic
gcgauuuugagcgucaugag

SEQ ID NO: 10127 - RNA, 20 nt, Artificial Sequence
  Synthetic
gcgucaugagacucucauug

SEQ ID NO: 10128 - RNA, 20 nt, Artificial Sequence
  Synthetic
gcuggccaaugagagucuca

SEQ ID NO: 10129 - RNA, 20 nt, Artificial Sequence
  Synthetic
ggagcuggccaaugagaguc

SEQ ID NO: 10130 - RNA, 20 nt, Artificial Sequence
  Synthetic
ggaggagcuggccaaugaga

SEQ ID NO: 10131 - RNA, 20 nt, Artificial Sequence
  Synthetic
ggccaaugagagucucauga

SEQ ID NO: 10132 - RNA, 20 nt, Artificial Sequence
  Synthetic
gucaugagacucucauuggc

SEQ ID NO: 10133 - RNA, 20 nt, Artificial Sequence
  Synthetic
gucucaugacgcucaaaauc

SEQ ID NO: 10134 - RNA, 20 nt, Artificial Sequence
  Synthetic
ucagcgauuuugagcgucau

SEQ ID NO: 10135 - RNA, 20 nt, Artificial Sequence
  Synthetic
ucaugagacucucauuggcc

SEQ ID NO: 10136 - RNA, 20 nt, Artificial Sequence
  Synthetic
ugagacucucauuggccagc

SEQ ID NO: 10137 - RNA, 20 nt, Artificial Sequence
  Synthetic
ugagagucucaugacgcuca

SEQ ID NO: 10138 - RNA, 20 nt, Artificial Sequence
  Synthetic
ugagcgucaugagacucuca

SEQ ID NO: 10139 - RNA, 20 nt, Artificial Sequence
  Synthetic
uggccaaugagagucucaug

SEQ ID NO: 10140 - RNA, 20 nt, Artificial Sequence
  Synthetic
uugagcgucaugagacucuc

SEQ ID NO: 10141 - RNA, 20 nt, Artificial Sequence
  Synthetic
uuugagcgucaugagacucu

SEQ ID NO: 10142 - RNA, 20 nt, Artificial Sequence
  Synthetic
uuuugagcgucaugagacuc

SEQ ID NO: 10143 - RNA, 21 nt, Artificial Sequence
  Synthetic
aaggaggagcuggccaaugag

SEQ ID NO: 10144 - RNA, 21 nt, Artificial Sequence
  Synthetic
aaugagagucucaugacgcuc

SEQ ID NO: 10145 - RNA, 21 nt, Artificial Sequence
  Synthetic
agacucucauuggccagcucc

SEQ ID NO: 10146 - RNA, 21 nt, Artificial Sequence
  Synthetic
agagucucaugacgcucaaaa

SEQ ID NO: 10147 - RNA, 21 nt, Artificial Sequence
  Synthetic
agcgauuuugagcgucaugag

SEQ ID NO: 10148 - RNA, 21 nt, Artificial Sequence
  Synthetic
agcgucaugagacucucauug

SEQ ID NO: 10149 - RNA, 21 nt, Artificial Sequence
  Synthetic
agcuggccaaugagagucuca

SEQ ID NO: 10150 - RNA, 21 nt, Artificial Sequence
  Synthetic
aggagcuggccaaugagaguc

SEQ ID NO: 10151 - RNA, 21 nt, Artificial Sequence
  Synthetic
aggaggagcuggccaaugaga

SEQ ID NO: 10152 - RNA, 21 nt, Artificial Sequence
  Synthetic
agucucaugacgcucaaaauc

SEQ ID NO: 10153 - RNA, 21 nt, Artificial Sequence
  Synthetic
augagacucucauuggccagc

SEQ ID NO: 10154 - RNA, 21 nt, Artificial Sequence
  Synthetic
augagagucucaugacgcuca

SEQ ID NO: 10155 - RNA, 21 nt, Artificial Sequence
  Synthetic
auuuugagcgucaugagacuc

SEQ ID NO: 10156 - RNA, 21 nt, Artificial Sequence
  Synthetic
caaggaggagcuggccaauga

SEQ ID NO: 10157 - RNA, 21 nt, Artificial Sequence
  Synthetic
caaugagagucucaugacgcu

SEQ ID NO: 10158 - RNA, 21 nt, Artificial Sequence
  Synthetic
cagcgauuuugagcgucauga

SEQ ID NO: 10159 - RNA, 21 nt, Artificial Sequence
  Synthetic
caugagacucucauuggccag

SEQ ID NO: 10160 - RNA, 21 nt, Artificial Sequence
  Synthetic
ccaaugagagucucaugacgc

SEQ ID NO: 10161 - RNA, 21 nt, Artificial Sequence
  Synthetic
cgauuuugagcgucaugagac

SEQ ID NO: 10162 - RNA, 21 nt, Artificial Sequence
  Synthetic
cgucaugagacucucauuggc

SEQ ID NO: 10163 - RNA, 21 nt, Artificial Sequence
  Synthetic
cucagcgauuuugagcgucau

SEQ ID NO: 10164 - RNA, 21 nt, Artificial Sequence
  Synthetic
cuggccaaugagagucucaug

SEQ ID NO: 10165 - RNA, 21 nt, Artificial Sequence
  Synthetic
gacucucauuggccagcuccu

SEQ ID NO: 10166 - RNA, 21 nt, Artificial Sequence
  Synthetic
gagacucucauuggccagcuc

SEQ ID NO: 10167 - RNA, 21 nt, Artificial Sequence
  Synthetic
gagagucucaugacgcucaaa

SEQ ID NO: 10168 - RNA, 21 nt, Artificial Sequence
  Synthetic
gagcgucaugagacucucauu

SEQ ID NO: 10169 - RNA, 21 nt, Artificial Sequence
  Synthetic
gagcuggccaaugagagucuc

SEQ ID NO: 10170 - RNA, 21 nt, Artificial Sequence
  Synthetic
gaggagcuggccaaugagagu

SEQ ID NO: 10171 - RNA, 21 nt, Artificial Sequence
  Synthetic
gagucucaugacgcucaaaau

SEQ ID NO: 10172 - RNA, 21 nt, Artificial Sequence
  Synthetic
gauuuugagcgucaugagacu

SEQ ID NO: 10173 - RNA, 21 nt, Artificial Sequence
  Synthetic
gccaaugagagucucaugacg

SEQ ID NO: 10174 - RNA, 21 nt, Artificial Sequence
  Synthetic
gcgauuuugagcgucaugaga

SEQ ID NO: 10175 - RNA, 21 nt, Artificial Sequence
  Synthetic
gcgucaugagacucucauugg

SEQ ID NO: 10176 - RNA, 21 nt, Artificial Sequence
  Synthetic
gcuggccaaugagagucucau

SEQ ID NO: 10177 - RNA, 21 nt, Artificial Sequence
  Synthetic
ggagcuggccaaugagagucu

SEQ ID NO: 10178 - RNA, 21 nt, Artificial Sequence
  Synthetic
ggaggagcuggccaaugagag

SEQ ID NO: 10179 - RNA, 21 nt, Artificial Sequence
  Synthetic
ggccaaugagagucucaugac

SEQ ID NO: 10180 - RNA, 21 nt, Artificial Sequence
  Synthetic
gucaugagacucucauuggcc

SEQ ID NO: 10181 - RNA, 21 nt, Artificial Sequence
  Synthetic
gucucaugacgcucaaaaucg

SEQ ID NO: 10182 - RNA, 21 nt, Artificial Sequence
  Synthetic
ucagcgauuuugagcgucaug

SEQ ID NO: 10183 - RNA, 21 nt, Artificial Sequence
  Synthetic
ucaugagacucucauuggcca

SEQ ID NO: 10184 - RNA, 21 nt, Artificial Sequence
  Synthetic
ugagacucucauuggccagcu

SEQ ID NO: 10185 - RNA, 21 nt, Artificial Sequence
  Synthetic
ugagagucucaugacgcucaa

SEQ ID NO: 10186 - RNA, 21 nt, Artificial Sequence
  Synthetic
ugagcgucaugagacucucau

SEQ ID NO: 10187 - RNA, 21 nt, Artificial Sequence
  Synthetic
uggccaaugagagucucauga

SEQ ID NO: 10188 - RNA, 21 nt, Artificial Sequence
  Synthetic
uugagcgucaugagacucuca

SEQ ID NO: 10189 - RNA, 21 nt, Artificial Sequence
  Synthetic
uuugagcgucaugagacucuc

SEQ ID NO: 10190 - RNA, 21 nt, Artificial Sequence
  Synthetic
uuuugagcgucaugagacucu

SEQ ID NO: 10191 - RNA, 22 nt, Artificial Sequence
  Synthetic
aaggaggagcuggccaaugaga

SEQ ID NO: 10192 - RNA, 22 nt, Artificial Sequence
  Synthetic
aaugagagucucaugacgcuca

SEQ ID NO: 10193 - RNA, 22 nt, Artificial Sequence
  Synthetic
agacucucauuggccagcuccu

SEQ ID NO: 10194 - RNA, 22 nt, Artificial Sequence
  Synthetic
agagucucaugacgcucaaaau

SEQ ID NO: 10195 - RNA, 22 nt, Artificial Sequence
  Synthetic
agcgauuuugagcgucaugaga

SEQ ID NO: 10196 - RNA, 22 nt, Artificial Sequence
  Synthetic
agcgucaugagacucucauugg

SEQ ID NO: 10197 - RNA, 22 nt, Artificial Sequence
  Synthetic
agcuggccaaugagagucucau

SEQ ID NO: 10198 - RNA, 22 nt, Artificial Sequence
  Synthetic
aggagcuggccaaugagagucu

SEQ ID NO: 10199 - RNA, 22 nt, Artificial Sequence
  Synthetic
aggaggagcuggccaaugagag

SEQ ID NO: 10200 - RNA, 22 nt, Artificial Sequence
  Synthetic
agucucaugacgcucaaaaucg

SEQ ID NO: 10201 - RNA, 22 nt, Artificial Sequence
  Synthetic
augagacucucauuggccagcu

SEQ ID NO: 10202 - RNA, 22 nt, Artificial Sequence
  Synthetic
augagagucucaugacgcucaa

SEQ ID NO: 10203 - RNA, 22 nt, Artificial Sequence
  Synthetic
auuuugagcgucaugagacucu

SEQ ID NO: 10204 - RNA, 22 nt, Artificial Sequence
  Synthetic
caaggaggagcuggccaaugag

SEQ ID NO: 10205 - RNA, 22 nt, Artificial Sequence
  Synthetic
caaugagagucucaugacgcuc

SEQ ID NO: 10206 - RNA, 22 nt, Artificial Sequence
  Synthetic
cagcgauuuugagcgucaugag

SEQ ID NO: 10207 - RNA, 22 nt, Artificial Sequence
  Synthetic
caugagacucucauuggccagc

SEQ ID NO: 10208 - RNA, 22 nt, Artificial Sequence
  Synthetic
ccaaggaggagcuggccaauga

SEQ ID NO: 10209 - RNA, 22 nt, Artificial Sequence
  Synthetic
ccaaugagagucucaugacgcu

SEQ ID NO: 10210 - RNA, 22 nt, Artificial Sequence
  Synthetic
cgauuuugagcgucaugagacu

SEQ ID NO: 10211 - RNA, 22 nt, Artificial Sequence
  Synthetic
cgucaugagacucucauuggcc

SEQ ID NO: 10212 - RNA, 22 nt, Artificial Sequence
  Synthetic
cucagcgauuuugagcgucaug

SEQ ID NO: 10213 - RNA, 22 nt, Artificial Sequence
  Synthetic
cuggccaaugagagucucauga

SEQ ID NO: 10214 - RNA, 22 nt, Artificial Sequence
  Synthetic
gacucucauuggccagcuccuc

SEQ ID NO: 10215 - RNA, 22 nt, Artificial Sequence
  Synthetic
gagacucucauuggccagcucc

SEQ ID NO: 10216 - RNA, 22 nt, Artificial Sequence
  Synthetic
gagagucucaugacgcucaaaa

SEQ ID NO: 10217 - RNA, 22 nt, Artificial Sequence
  Synthetic
gagcgucaugagacucucauug

SEQ ID NO: 10218 - RNA, 22 nt, Artificial Sequence
  Synthetic
gagcuggccaaugagagucuca

SEQ ID NO: 10219 - RNA, 22 nt, Artificial Sequence
  Synthetic
gaggagcuggccaaugagaguc

SEQ ID NO: 10220 - RNA, 22 nt, Artificial Sequence
  Synthetic
gagucucaugacgcucaaaauc

SEQ ID NO: 10221 - RNA, 22 nt, Artificial Sequence
  Synthetic
gauuuugagcgucaugagacuc

SEQ ID NO: 10222 - RNA, 22 nt, Artificial Sequence
  Synthetic
gccaaugagagucucaugacgc

SEQ ID NO: 10223 - RNA, 22 nt, Artificial Sequence
  Synthetic
gcgauuuugagcgucaugagac

SEQ ID NO: 10224 - RNA, 22 nt, Artificial Sequence
  Synthetic
gcgucaugagacucucauuggc

SEQ ID NO: 10225 - RNA, 22 nt, Artificial Sequence
  Synthetic
gcuggccaaugagagucucaug

SEQ ID NO: 10226 - RNA, 22 nt, Artificial Sequence
  Synthetic
ggagcuggccaaugagagucuc

SEQ ID NO: 10227 - RNA, 22 nt, Artificial Sequence
  Synthetic
ggaggagcuggccaaugagagu

SEQ ID NO: 10228 - RNA, 22 nt, Artificial Sequence
  Synthetic
ggccaaugagagucucaugacg

SEQ ID NO: 10229 - RNA, 22 nt, Artificial Sequence
  Synthetic
gucaugagacucucauuggcca

SEQ ID NO: 10230 - RNA, 22 nt, Artificial Sequence
  Synthetic
gucucaugacgcucaaaaucgc

SEQ ID NO: 10231 - RNA, 22 nt, Artificial Sequence
  Synthetic
ucagcgauuuugagcgucauga

SEQ ID NO: 10232 - RNA, 22 nt, Artificial Sequence
  Synthetic
ucaugagacucucauuggccag

SEQ ID NO: 10233 - RNA, 22 nt, Artificial Sequence
  Synthetic
ucucagcgauuuugagcgucau

SEQ ID NO: 10234 - RNA, 22 nt, Artificial Sequence
  Synthetic
ugagacucucauuggccagcuc

SEQ ID NO: 10235 - RNA, 22 nt, Artificial Sequence
  Synthetic
ugagagucucaugacgcucaaa

SEQ ID NO: 10236 - RNA, 22 nt, Artificial Sequence
  Synthetic
ugagcgucaugagacucucauu

SEQ ID NO: 10237 - RNA, 22 nt, Artificial Sequence
  Synthetic
uggccaaugagagucucaugac

SEQ ID NO: 10238 - RNA, 22 nt, Artificial Sequence
  Synthetic
uugagcgucaugagacucucau

SEQ ID NO: 10239 - RNA, 22 nt, Artificial Sequence
  Synthetic
uuugagcgucaugagacucuca

SEQ ID NO: 10240 - RNA, 22 nt, Artificial Sequence
  Synthetic
uuuugagcgucaugagacucuc

SEQ ID NO: 10241 - RNA, 20 nt, Artificial Sequence
  Synthetic
aacaccgaggagcuggccaa

SEQ ID NO: 10242 - RNA, 20 nt, Artificial Sequence
  Synthetic
acaccgaggagcuggccaau

SEQ ID NO: 10243 - RNA, 20 nt, Artificial Sequence
  Synthetic
accgaggagcuggccaauga

SEQ ID NO: 10244 - RNA, 20 nt, Artificial Sequence
  Synthetic
agccucucauuggccagcuc

SEQ ID NO: 10245 - RNA, 20 nt, Artificial Sequence
  Synthetic
agcuccucgguguucagcac

SEQ ID NO: 10246 - RNA, 20 nt, Artificial Sequence
  Synthetic
auuggccagcuccucggugu

SEQ ID NO: 10247 - RNA, 20 nt, Artificial Sequence
  Synthetic
caccgaggagcuggccaaug

SEQ ID NO: 10248 - RNA, 20 nt, Artificial Sequence
  Synthetic
cagcuccucgguguucagca

SEQ ID NO: 10249 - RNA, 20 nt, Artificial Sequence
  Synthetic
cauuggccagcuccucggug

SEQ ID NO: 10250 - RNA, 20 nt, Artificial Sequence
  Synthetic
ccagcuccucgguguucagc

SEQ ID NO: 10251 - RNA, 20 nt, Artificial Sequence
  Synthetic
ccgaggagcuggccaaugag

SEQ ID NO: 10252 - RNA, 20 nt, Artificial Sequence
  Synthetic
ccucgguguucagcaccagc

SEQ ID NO: 10253 - RNA, 20 nt, Artificial Sequence
  Synthetic
ccucucauuggccagcuccu

SEQ ID NO: 10254 - RNA, 20 nt, Artificial Sequence
  Synthetic
cgaggagcuggccaaugaga

SEQ ID NO: 10255 - RNA, 20 nt, Artificial Sequence
  Synthetic
cggcuggugcugaacaccga

SEQ ID NO: 10256 - RNA, 20 nt, Artificial Sequence
  Synthetic
cucauuggccagcuccucgg

SEQ ID NO: 10257 - RNA, 20 nt, Artificial Sequence
  Synthetic
cuccucgguguucagcacca

SEQ ID NO: 10258 - RNA, 20 nt, Artificial Sequence
  Synthetic
cucgguguucagcaccagcc

SEQ ID NO: 10259 - RNA, 20 nt, Artificial Sequence
  Synthetic
cucucauuggccagcuccuc

SEQ ID NO: 10260 - RNA, 20 nt, Artificial Sequence
  Synthetic
cugaacaccgaggagcuggc

SEQ ID NO: 10261 - RNA, 20 nt, Artificial Sequence
  Synthetic
cuggugcugaacaccgagga

SEQ ID NO: 10262 - RNA, 20 nt, Artificial Sequence
  Synthetic
gaacaccgaggagcuggcca

SEQ ID NO: 10263 - RNA, 20 nt, Artificial Sequence
  Synthetic
gagccucucauuggccagcu

SEQ ID NO: 10264 - RNA, 20 nt, Artificial Sequence
  Synthetic
gccagcuccucgguguucag

SEQ ID NO: 10265 - RNA, 20 nt, Artificial Sequence
  Synthetic
gccucucauuggccagcucc

SEQ ID NO: 10266 - RNA, 20 nt, Artificial Sequence
  Synthetic
gcggcuggugcugaacaccg

SEQ ID NO: 10267 - RNA, 20 nt, Artificial Sequence
  Synthetic
gcuccucgguguucagcacc

SEQ ID NO: 10268 - RNA, 20 nt, Artificial Sequence
  Synthetic
gcugaacaccgaggagcugg

SEQ ID NO: 10269 - RNA, 20 nt, Artificial Sequence
  Synthetic
gcuggugcugaacaccgagg

SEQ ID NO: 10270 - RNA, 20 nt, Artificial Sequence
  Synthetic
ggccagcuccucgguguuca

SEQ ID NO: 10271 - RNA, 20 nt, Artificial Sequence
  Synthetic
ggcggcuggugcugaacacc

SEQ ID NO: 10272 - RNA, 20 nt, Artificial Sequence
  Synthetic
ggcuggugcugaacaccgag

SEQ ID NO: 10273 - RNA, 20 nt, Artificial Sequence
  Synthetic
gggcggcuggugcugaacac

SEQ ID NO: 10274 - RNA, 20 nt, Artificial Sequence
  Synthetic
ggggcggcuggugcugaaca

SEQ ID NO: 10275 - RNA, 20 nt, Artificial Sequence
  Synthetic
gggggcggcuggugcugaac

SEQ ID NO: 10276 - RNA, 20 nt, Artificial Sequence
  Synthetic
ggugcugaacaccgaggagc

SEQ ID NO: 10277 - RNA, 20 nt, Artificial Sequence
  Synthetic
gugcugaacaccgaggagcu

SEQ ID NO: 10278 - RNA, 20 nt, Artificial Sequence
  Synthetic
ucauuggccagcuccucggu

SEQ ID NO: 10279 - RNA, 20 nt, Artificial Sequence
  Synthetic
uccucgguguucagcaccag

SEQ ID NO: 10280 - RNA, 20 nt, Artificial Sequence
  Synthetic
ucgguguucagcaccagccg

SEQ ID NO: 10281 - RNA, 20 nt, Artificial Sequence
  Synthetic
ucucauuggccagcuccucg

SEQ ID NO: 10282 - RNA, 20 nt, Artificial Sequence
  Synthetic
ugaacaccgaggagcuggcc

SEQ ID NO: 10283 - RNA, 20 nt, Artificial Sequence
  Synthetic
ugcugaacaccgaggagcug

SEQ ID NO: 10284 - RNA, 20 nt, Artificial Sequence
  Synthetic
uggccagcuccucgguguuc

SEQ ID NO: 10285 - RNA, 20 nt, Artificial Sequence
  Synthetic
uggugcugaacaccgaggag

SEQ ID NO: 10286 - RNA, 20 nt, Artificial Sequence
  Synthetic
uuggccagcuccucgguguu

SEQ ID NO: 10287 - RNA, 21 nt, Artificial Sequence
  Synthetic
aacaccgaggagcuggccaau

SEQ ID NO: 10288 - RNA, 21 nt, Artificial Sequence
  Synthetic
acaccgaggagcuggccaaug

SEQ ID NO: 10289 - RNA, 21 nt, Artificial Sequence
  Synthetic
accgaggagcuggccaaugag

SEQ ID NO: 10290 - RNA, 21 nt, Artificial Sequence
  Synthetic
agccucucauuggccagcucc

SEQ ID NO: 10291 - RNA, 21 nt, Artificial Sequence
  Synthetic
agcuccucgguguucagcacc

SEQ ID NO: 10292 - RNA, 21 nt, Artificial Sequence
  Synthetic
auuggccagcuccucgguguu

SEQ ID NO: 10293 - RNA, 21 nt, Artificial Sequence
  Synthetic
caccgaggagcuggccaauga

SEQ ID NO: 10294 - RNA, 21 nt, Artificial Sequence
  Synthetic
cagcuccucgguguucagcac

SEQ ID NO: 10295 - RNA, 21 nt, Artificial Sequence
  Synthetic
cauuggccagcuccucggugu

SEQ ID NO: 10296 - RNA, 21 nt, Artificial Sequence
  Synthetic
ccagcuccucgguguucagca

SEQ ID NO: 10297 - RNA, 21 nt, Artificial Sequence
  Synthetic
ccgaggagcuggccaaugaga

SEQ ID NO: 10298 - RNA, 21 nt, Artificial Sequence
  Synthetic
ccucgguguucagcaccagcc

SEQ ID NO: 10299 - RNA, 21 nt, Artificial Sequence
  Synthetic
ccucucauuggccagcuccuc

SEQ ID NO: 10300 - RNA, 21 nt, Artificial Sequence
  Synthetic
cgaggagcuggccaaugagag

SEQ ID NO: 10301 - RNA, 21 nt, Artificial Sequence
  Synthetic
cggcuggugcugaacaccgag

SEQ ID NO: 10302 - RNA, 21 nt, Artificial Sequence
  Synthetic
cucauuggccagcuccucggu

SEQ ID NO: 10303 - RNA, 21 nt, Artificial Sequence
  Synthetic
cuccucgguguucagcaccag

SEQ ID NO: 10304 - RNA, 21 nt, Artificial Sequence
  Synthetic
cucgguguucagcaccagccg

SEQ ID NO: 10305 - RNA, 21 nt, Artificial Sequence
  Synthetic
cucucauuggccagcuccucg

SEQ ID NO: 10306 - RNA, 21 nt, Artificial Sequence
  Synthetic
cugaacaccgaggagcuggcc

SEQ ID NO: 10307 - RNA, 21 nt, Artificial Sequence
  Synthetic
cuggugcugaacaccgaggag

SEQ ID NO: 10308 - RNA, 21 nt, Artificial Sequence
  Synthetic
gaacaccgaggagcuggccaa

SEQ ID NO: 10309 - RNA, 21 nt, Artificial Sequence
  Synthetic
gagccucucauuggccagcuc

SEQ ID NO: 10310 - RNA, 21 nt, Artificial Sequence
  Synthetic
gccagcuccucgguguucagc

SEQ ID NO: 10311 - RNA, 21 nt, Artificial Sequence
  Synthetic
gccucucauuggccagcuccu

SEQ ID NO: 10312 - RNA, 21 nt, Artificial Sequence
  Synthetic
gcggcuggugcugaacaccga

SEQ ID NO: 10313 - RNA, 21 nt, Artificial Sequence
  Synthetic
gcuccucgguguucagcacca

SEQ ID NO: 10314 - RNA, 21 nt, Artificial Sequence
  Synthetic
gcugaacaccgaggagcuggc

SEQ ID NO: 10315 - RNA, 21 nt, Artificial Sequence
  Synthetic
gcuggugcugaacaccgagga

SEQ ID NO: 10316 - RNA, 21 nt, Artificial Sequence
  Synthetic
ggccagcuccucgguguucag

SEQ ID NO: 10317 - RNA, 21 nt, Artificial Sequence
  Synthetic
ggcggcuggugcugaacaccg

SEQ ID NO: 10318 - RNA, 21 nt, Artificial Sequence
  Synthetic
ggcuggugcugaacaccgagg

SEQ ID NO: 10319 - RNA, 21 nt, Artificial Sequence
  Synthetic
gggcggcuggugcugaacacc

SEQ ID NO: 10320 - RNA, 21 nt, Artificial Sequence
  Synthetic
ggggcggcuggugcugaacac

SEQ ID NO: 10321 - RNA, 21 nt, Artificial Sequence
  Synthetic
gggggcggcuggugcugaaca

SEQ ID NO: 10322 - RNA, 21 nt, Artificial Sequence
  Synthetic
ggggggcggcuggugcugaac

SEQ ID NO: 10323 - RNA, 21 nt, Artificial Sequence
  Synthetic
ggugcugaacaccgaggagcu

SEQ ID NO: 10324 - RNA, 21 nt, Artificial Sequence
  Synthetic
gugcugaacaccgaggagcug

SEQ ID NO: 10325 - RNA, 21 nt, Artificial Sequence
  Synthetic
ucauuggccagcuccucggug

SEQ ID NO: 10326 - RNA, 21 nt, Artificial Sequence
  Synthetic
uccucgguguucagcaccagc

SEQ ID NO: 10327 - RNA, 21 nt, Artificial Sequence
  Synthetic
ucgguguucagcaccagccgc

SEQ ID NO: 10328 - RNA, 21 nt, Artificial Sequence
  Synthetic
ucucauuggccagcuccucgg

SEQ ID NO: 10329 - RNA, 21 nt, Artificial Sequence
  Synthetic
ugaacaccgaggagcuggcca

SEQ ID NO: 10330 - RNA, 21 nt, Artificial Sequence
  Synthetic
ugagccucucauuggccagcu

SEQ ID NO: 10331 - RNA, 21 nt, Artificial Sequence
  Synthetic
ugcugaacaccgaggagcugg

SEQ ID NO: 10332 - RNA, 21 nt, Artificial Sequence
  Synthetic
uggccagcuccucgguguuca

SEQ ID NO: 10333 - RNA, 21 nt, Artificial Sequence
  Synthetic
uggugcugaacaccgaggagc

SEQ ID NO: 10334 - RNA, 21 nt, Artificial Sequence
  Synthetic
uuggccagcuccucgguguuc

SEQ ID NO: 10335 - RNA, 22 nt, Artificial Sequence
  Synthetic
aacaccgaggagcuggccaaug

SEQ ID NO: 10336 - RNA, 22 nt, Artificial Sequence
  Synthetic
acaccgaggagcuggccaauga

SEQ ID NO: 10337 - RNA, 22 nt, Artificial Sequence
  Synthetic
accgaggagcuggccaaugaga

SEQ ID NO: 10338 - RNA, 22 nt, Artificial Sequence
  Synthetic
agccucucauuggccagcuccu

SEQ ID NO: 10339 - RNA, 22 nt, Artificial Sequence
  Synthetic
agcuccucgguguucagcacca

SEQ ID NO: 10340 - RNA, 22 nt, Artificial Sequence
  Synthetic
augagccucucauuggccagcu

SEQ ID NO: 10341 - RNA, 22 nt, Artificial Sequence
  Synthetic
auuggccagcuccucgguguuc

SEQ ID NO: 10342 - RNA, 22 nt, Artificial Sequence
  Synthetic
caccgaggagcuggccaaugag

SEQ ID NO: 10343 - RNA, 22 nt, Artificial Sequence
  Synthetic
cagcuccucgguguucagcacc

SEQ ID NO: 10344 - RNA, 22 nt, Artificial Sequence
  Synthetic
cauuggccagcuccucgguguu

SEQ ID NO: 10345 - RNA, 22 nt, Artificial Sequence
  Synthetic
ccagcuccucgguguucagcac

SEQ ID NO: 10346 - RNA, 22 nt, Artificial Sequence
  Synthetic
ccgaggagcuggccaaugagag

SEQ ID NO: 10347 - RNA, 22 nt, Artificial Sequence
  Synthetic
ccucgguguucagcaccagccg

SEQ ID NO: 10348 - RNA, 22 nt, Artificial Sequence
  Synthetic
ccucucauuggccagcuccucg

SEQ ID NO: 10349 - RNA, 22 nt, Artificial Sequence
  Synthetic
cgaggagcuggccaaugagagg

SEQ ID NO: 10350 - RNA, 22 nt, Artificial Sequence
  Synthetic
cggcuggugcugaacaccgagg

SEQ ID NO: 10351 - RNA, 22 nt, Artificial Sequence
  Synthetic
cucauuggccagcuccucggug

SEQ ID NO: 10352 - RNA, 22 nt, Artificial Sequence
  Synthetic
cuccucgguguucagcaccagc

SEQ ID NO: 10353 - RNA, 22 nt, Artificial Sequence
  Synthetic
cucgguguucagcaccagccgc

SEQ ID NO: 10354 - RNA, 22 nt, Artificial Sequence
  Synthetic
cucucauuggccagcuccucgg

SEQ ID NO: 10355 - RNA, 22 nt, Artificial Sequence
  Synthetic
cugaacaccgaggagcuggcca

SEQ ID NO: 10356 - RNA, 22 nt, Artificial Sequence
  Synthetic
cuggugcugaacaccgaggagc

SEQ ID NO: 10357 - RNA, 22 nt, Artificial Sequence
  Synthetic
gaacaccgaggagcuggccaau

SEQ ID NO: 10358 - RNA, 22 nt, Artificial Sequence
  Synthetic
gagccucucauuggccagcucc

SEQ ID NO: 10359 - RNA, 22 nt, Artificial Sequence
  Synthetic
gccagcuccucgguguucagca

SEQ ID NO: 10360 - RNA, 22 nt, Artificial Sequence
  Synthetic
gccucucauuggccagcuccuc

SEQ ID NO: 10361 - RNA, 22 nt, Artificial Sequence
  Synthetic
gcggcuggugcugaacaccgag

SEQ ID NO: 10362 - RNA, 22 nt, Artificial Sequence
  Synthetic
gcuccucgguguucagcaccag

SEQ ID NO: 10363 - RNA, 22 nt, Artificial Sequence
  Synthetic
gcugaacaccgaggagcuggcc

SEQ ID NO: 10364 - RNA, 22 nt, Artificial Sequence
  Synthetic
gcuggugcugaacaccgaggag

SEQ ID NO: 10365 - RNA, 22 nt, Artificial Sequence
  Synthetic
ggccagcuccucgguguucagc

SEQ ID NO: 10366 - RNA, 22 nt, Artificial Sequence
  Synthetic
ggcggcuggugcugaacaccga

SEQ ID NO: 10367 - RNA, 22 nt, Artificial Sequence
  Synthetic
ggcuggugcugaacaccgagga

SEQ ID NO: 10368 - RNA, 22 nt, Artificial Sequence
  Synthetic
gggcggcuggugcugaacaccg

SEQ ID NO: 10369 - RNA, 22 nt, Artificial Sequence
  Synthetic
ggggcggcuggugcugaacacc

SEQ ID NO: 10370 - RNA, 22 nt, Artificial Sequence
  Synthetic
gggggcggcuggugcugaacac

SEQ ID NO: 10371 - RNA, 22 nt, Artificial Sequence
  Synthetic
ggggggcggcuggugcugaaca

SEQ ID NO: 10372 - RNA, 22 nt, Artificial Sequence
  Synthetic
ggugcugaacaccgaggagcug

SEQ ID NO: 10373 - RNA, 22 nt, Artificial Sequence
  Synthetic
gugcugaacaccgaggagcugg

SEQ ID NO: 10374 - RNA, 22 nt, Artificial Sequence
  Synthetic
ucauuggccagcuccucggugu

SEQ ID NO: 10375 - RNA, 22 nt, Artificial Sequence
  Synthetic
uccucgguguucagcaccagcc

SEQ ID NO: 10376 - RNA, 22 nt, Artificial Sequence
  Synthetic
ucgguguucagcaccagccgcc

SEQ ID NO: 10377 - RNA, 22 nt, Artificial Sequence
  Synthetic
ucucauuggccagcuccucggu

SEQ ID NO: 10378 - RNA, 22 nt, Artificial Sequence
  Synthetic
ugaacaccgaggagcuggccaa

SEQ ID NO: 10379 - RNA, 22 nt, Artificial Sequence
  Synthetic
ugagccucucauuggccagcuc

SEQ ID NO: 10380 - RNA, 22 nt, Artificial Sequence
  Synthetic
ugcugaacaccgaggagcuggc

SEQ ID NO: 10381 - RNA, 22 nt, Artificial Sequence
  Synthetic
uggccagcuccucgguguucag

SEQ ID NO: 10382 - RNA, 22 nt, Artificial Sequence
  Synthetic
uggugcugaacaccgaggagcu

SEQ ID NO: 10383 - RNA, 22 nt, Artificial Sequence
  Synthetic
uuggccagcuccucgguguuca

SEQ ID NO: 10384 - RNA, 20 nt, Artificial Sequence
  Synthetic
aagaugaugcggcugggggg

SEQ ID NO: 10385 - RNA, 20 nt, Artificial Sequence
  Synthetic
ccuccuugguguucagcacc

SEQ ID NO: 10386 - RNA, 20 nt, Artificial Sequence
  Synthetic
ccuugguguucagcaccagc

SEQ ID NO: 10387 - RNA, 20 nt, Artificial Sequence
  Synthetic
cgcuggugcugaacaccaag

SEQ ID NO: 10388 - RNA, 20 nt, Artificial Sequence
  Synthetic
cuccuugguguucagcacca

SEQ ID NO: 10389 - RNA, 20 nt, Artificial Sequence
  Synthetic
cuugguguucagcaccagcg

SEQ ID NO: 10390 - RNA, 20 nt, Artificial Sequence
  Synthetic
gcgcuggugcugaacaccaa

SEQ ID NO: 10391 - RNA, 20 nt, Artificial Sequence
  Synthetic
ggcgcuggugcugaacacca

SEQ ID NO: 10392 - RNA, 20 nt, Artificial Sequence
  Synthetic
gggcgcuggugcugaacacc

SEQ ID NO: 10393 - RNA, 20 nt, Artificial Sequence
  Synthetic
ggggcgcuggugcugaacac

SEQ ID NO: 10394 - RNA, 20 nt, Artificial Sequence
  Synthetic
gggggcgcuggugcugaaca

SEQ ID NO: 10395 - RNA, 20 nt, Artificial Sequence
  Synthetic
ggggggcgcuggugcugaac

SEQ ID NO: 10396 - RNA, 20 nt, Artificial Sequence
  Synthetic
gguguucagcaccagcgccc

SEQ ID NO: 10397 - RNA, 20 nt, Artificial Sequence
  Synthetic
guguucagcaccagcgcccc

SEQ ID NO: 10398 - RNA, 20 nt, Artificial Sequence
  Synthetic
guucagcaccagcgcccccc

SEQ ID NO: 10399 - RNA, 20 nt, Artificial Sequence
  Synthetic
uccuccuugguguucagcac

SEQ ID NO: 10400 - RNA, 20 nt, Artificial Sequence
  Synthetic
uccuugguguucagcaccag

SEQ ID NO: 10401 - RNA, 20 nt, Artificial Sequence
  Synthetic
ugguguucagcaccagcgcc

SEQ ID NO: 10402 - RNA, 20 nt, Artificial Sequence
  Synthetic
uguucagcaccagcgccccc

SEQ ID NO: 10403 - RNA, 20 nt, Artificial Sequence
  Synthetic
uugguguucagcaccagcgc

SEQ ID NO: 10404 - RNA, 21 nt, Artificial Sequence
  Synthetic
aaagaugaugcggcugggggg

SEQ ID NO: 10405 - RNA, 21 nt, Artificial Sequence
  Synthetic
ccuccuugguguucagcacca

SEQ ID NO: 10406 - RNA, 21 nt, Artificial Sequence
  Synthetic
ccuugguguucagcaccagcg

SEQ ID NO: 10407 - RNA, 21 nt, Artificial Sequence
  Synthetic
cgcuggugcugaacaccaagg

SEQ ID NO: 10408 - RNA, 21 nt, Artificial Sequence
  Synthetic
cuccuccuugguguucagcac

SEQ ID NO: 10409 - RNA, 21 nt, Artificial Sequence
  Synthetic
cuccuugguguucagcaccag

SEQ ID NO: 10410 - RNA, 21 nt, Artificial Sequence
  Synthetic
cuugguguucagcaccagcgc

SEQ ID NO: 10411 - RNA, 21 nt, Artificial Sequence
  Synthetic
gcgcuggugcugaacaccaag

SEQ ID NO: 10412 - RNA, 21 nt, Artificial Sequence
  Synthetic
ggcgcuggugcugaacaccaa

SEQ ID NO: 10413 - RNA, 21 nt, Artificial Sequence
  Synthetic
gggcgcuggugcugaacacca

SEQ ID NO: 10414 - RNA, 21 nt, Artificial Sequence
  Synthetic
ggggcgcuggugcugaacacc

SEQ ID NO: 10415 - RNA, 21 nt, Artificial Sequence
  Synthetic
gggggcgcuggugcugaacac

SEQ ID NO: 10416 - RNA, 21 nt, Artificial Sequence
  Synthetic
ggggggcgcuggugcugaaca

SEQ ID NO: 10417 - RNA, 21 nt, Artificial Sequence
  Synthetic
gguguucagcaccagcgcccc

SEQ ID NO: 10418 - RNA, 21 nt, Artificial Sequence
  Synthetic
guguucagcaccagcgccccc

SEQ ID NO: 10419 - RNA, 21 nt, Artificial Sequence
  Synthetic
uccuccuugguguucagcacc

SEQ ID NO: 10420 - RNA, 21 nt, Artificial Sequence
  Synthetic
uccuugguguucagcaccagc

SEQ ID NO: 10421 - RNA, 21 nt, Artificial Sequence
  Synthetic
ugguguucagcaccagcgccc

SEQ ID NO: 10422 - RNA, 21 nt, Artificial Sequence
  Synthetic
uguucagcaccagcgcccccc

SEQ ID NO: 10423 - RNA, 21 nt, Artificial Sequence
  Synthetic
uugguguucagcaccagcgcc

SEQ ID NO: 10424 - RNA, 22 nt, Artificial Sequence
  Synthetic
aaaagaugaugcggcugggggg

SEQ ID NO: 10425 - RNA, 22 nt, Artificial Sequence
  Synthetic
ccuccuugguguucagcaccag

SEQ ID NO: 10426 - RNA, 22 nt, Artificial Sequence
  Synthetic
ccuugguguucagcaccagcgc

SEQ ID NO: 10427 - RNA, 22 nt, Artificial Sequence
  Synthetic
cgcuggugcugaacaccaagga

SEQ ID NO: 10428 - RNA, 22 nt, Artificial Sequence
  Synthetic
cuccuccuugguguucagcacc

SEQ ID NO: 10429 - RNA, 22 nt, Artificial Sequence
  Synthetic
cuccuugguguucagcaccagc

SEQ ID NO: 10430 - RNA, 22 nt, Artificial Sequence
  Synthetic
cuugguguucagcaccagcgcc

SEQ ID NO: 10431 - RNA, 22 nt, Artificial Sequence
  Synthetic
gcgcuggugcugaacaccaagg

SEQ ID NO: 10432 - RNA, 22 nt, Artificial Sequence
  Synthetic
gcuccuccuugguguucagcac

SEQ ID NO: 10433 - RNA, 22 nt, Artificial Sequence
  Synthetic
ggcgcuggugcugaacaccaag

SEQ ID NO: 10434 - RNA, 22 nt, Artificial Sequence
  Synthetic
gggcgcuggugcugaacaccaa

SEQ ID NO: 10435 - RNA, 22 nt, Artificial Sequence
  Synthetic
ggggcgcuggugcugaacacca

SEQ ID NO: 10436 - RNA, 22 nt, Artificial Sequence
  Synthetic
gggggcgcuggugcugaacacc

SEQ ID NO: 10437 - RNA, 22 nt, Artificial Sequence
  Synthetic
ggggggcgcuggugcugaacac

SEQ ID NO: 10438 - RNA, 22 nt, Artificial Sequence
  Synthetic
gguguucagcaccagcgccccc

SEQ ID NO: 10439 - RNA, 22 nt, Artificial Sequence
  Synthetic
guguucagcaccagcgcccccc

SEQ ID NO: 10440 - RNA, 22 nt, Artificial Sequence
  Synthetic
uccuccuugguguucagcacca

SEQ ID NO: 10441 - RNA, 22 nt, Artificial Sequence
  Synthetic
uccuugguguucagcaccagcg

SEQ ID NO: 10442 - RNA, 22 nt, Artificial Sequence
  Synthetic
ugguguucagcaccagcgcccc

SEQ ID NO: 10443 - RNA, 22 nt, Artificial Sequence
  Synthetic
uugguguucagcaccagcgccc

SEQ ID NO: 10444 - RNA, 20 nt, Artificial Sequence
  Synthetic
aaaagaugaugcggcucggc

SEQ ID NO: 10445 - RNA, 20 nt, Artificial Sequence
  Synthetic
aaagaaaagaugaugcggcu

SEQ ID NO: 10446 - RNA, 20 nt, Artificial Sequence
  Synthetic
aaagaugaugcggcucggcu

SEQ ID NO: 10447 - RNA, 20 nt, Artificial Sequence
  Synthetic
aagaaaagaugaugcggcuc

SEQ ID NO: 10448 - RNA, 20 nt, Artificial Sequence
  Synthetic
aagaugaugcggcucggcug

SEQ ID NO: 10449 - RNA, 20 nt, Artificial Sequence
  Synthetic
accagccgagccgcaucauc

SEQ ID NO: 10450 - RNA, 20 nt, Artificial Sequence
  Synthetic
agaaaagaugaugcggcucg

SEQ ID NO: 10451 - RNA, 20 nt, Artificial Sequence
  Synthetic
agaugaugcggcucggcugg

SEQ ID NO: 10452 - RNA, 20 nt, Artificial Sequence
  Synthetic
agcaccagccgagccgcauc

SEQ ID NO: 10453 - RNA, 20 nt, Artificial Sequence
  Synthetic
agccgagccgcaucaucuuu

SEQ ID NO: 10454 - RNA, 20 nt, Artificial Sequence
  Synthetic
augaugcggcucggcuggug

SEQ ID NO: 10455 - RNA, 20 nt, Artificial Sequence
  Synthetic
augcggcucggcuggugcug

SEQ ID NO: 10456 - RNA, 20 nt, Artificial Sequence
  Synthetic
caccagccgagccgcaucau

SEQ ID NO: 10457 - RNA, 20 nt, Artificial Sequence
  Synthetic
cagcaccagccgagccgcau

SEQ ID NO: 10458 - RNA, 20 nt, Artificial Sequence
  Synthetic
cagccgagccgcaucaucuu

SEQ ID NO: 10459 - RNA, 20 nt, Artificial Sequence
  Synthetic
ccagccgagccgcaucaucu

SEQ ID NO: 10460 - RNA, 20 nt, Artificial Sequence
  Synthetic
ccgagccgcaucaucuuuuc

SEQ ID NO: 10461 - RNA, 20 nt, Artificial Sequence
  Synthetic
cgagccgcaucaucuuuucu

SEQ ID NO: 10462 - RNA, 20 nt, Artificial Sequence
  Synthetic
cggcucggcuggugcugaac

SEQ ID NO: 10463 - RNA, 20 nt, Artificial Sequence
  Synthetic
cucggcuggugcugaacacc

SEQ ID NO: 10464 - RNA, 20 nt, Artificial Sequence
  Synthetic
cuugguguucagcaccagcc

SEQ ID NO: 10465 - RNA, 20 nt, Artificial Sequence
  Synthetic
gaaaagaugaugcggcucgg

SEQ ID NO: 10466 - RNA, 20 nt, Artificial Sequence
  Synthetic
gaaagaaaagaugaugcggc

SEQ ID NO: 10467 - RNA, 20 nt, Artificial Sequence
  Synthetic
gaugaugcggcucggcuggu

SEQ ID NO: 10468 - RNA, 20 nt, Artificial Sequence
  Synthetic
gaugcggcucggcuggugcu

SEQ ID NO: 10469 - RNA, 20 nt, Artificial Sequence
  Synthetic
gcaccagccgagccgcauca

SEQ ID NO: 10470 - RNA, 20 nt, Artificial Sequence
  Synthetic
gccgagccgcaucaucuuuu

SEQ ID NO: 10471 - RNA, 20 nt, Artificial Sequence
  Synthetic
gcggcucggcuggugcugaa

SEQ ID NO: 10472 - RNA, 20 nt, Artificial Sequence
  Synthetic
gcucggcuggugcugaacac

SEQ ID NO: 10473 - RNA, 20 nt, Artificial Sequence
  Synthetic
ggcucggcuggugcugaaca

SEQ ID NO: 10474 - RNA, 20 nt, Artificial Sequence
  Synthetic
gguguucagcaccagccgag

SEQ ID NO: 10475 - RNA, 20 nt, Artificial Sequence
  Synthetic
guguucagcaccagccgagc

SEQ ID NO: 10476 - RNA, 20 nt, Artificial Sequence
  Synthetic
guucagcaccagccgagccg

SEQ ID NO: 10477 - RNA, 20 nt, Artificial Sequence
  Synthetic
ucagcaccagccgagccgca

SEQ ID NO: 10478 - RNA, 20 nt, Artificial Sequence
  Synthetic
ucggcuggugcugaacacca

SEQ ID NO: 10479 - RNA, 20 nt, Artificial Sequence
  Synthetic
ugaaagaaaagaugaugcgg

SEQ ID NO: 10480 - RNA, 20 nt, Artificial Sequence
  Synthetic
ugaugcggcucggcuggugc

SEQ ID NO: 10481 - RNA, 20 nt, Artificial Sequence
  Synthetic
ugcggcucggcuggugcuga

SEQ ID NO: 10482 - RNA, 20 nt, Artificial Sequence
  Synthetic
ugguguucagcaccagccga

SEQ ID NO: 10483 - RNA, 20 nt, Artificial Sequence
  Synthetic
uguucagcaccagccgagcc

SEQ ID NO: 10484 - RNA, 20 nt, Artificial Sequence
  Synthetic
uucagcaccagccgagccgc

SEQ ID NO: 10485 - RNA, 20 nt, Artificial Sequence
  Synthetic
uugaaagaaaagaugaugcg

SEQ ID NO: 10486 - RNA, 20 nt, Artificial Sequence
  Synthetic
uugguguucagcaccagccg

SEQ ID NO: 10487 - RNA, 21 nt, Artificial Sequence
  Synthetic
aaaagaugaugcggcucggcu

SEQ ID NO: 10488 - RNA, 21 nt, Artificial Sequence
  Synthetic
aaagaaaagaugaugcggcuc

SEQ ID NO: 10489 - RNA, 21 nt, Artificial Sequence
  Synthetic
aaagaugaugcggcucggcug

SEQ ID NO: 10490 - RNA, 21 nt, Artificial Sequence
  Synthetic
aagaaaagaugaugcggcucg

SEQ ID NO: 10491 - RNA, 21 nt, Artificial Sequence
  Synthetic
aagaugaugcggcucggcugg

SEQ ID NO: 10492 - RNA, 21 nt, Artificial Sequence
  Synthetic
accagccgagccgcaucaucu

SEQ ID NO: 10493 - RNA, 21 nt, Artificial Sequence
  Synthetic
agaaaagaugaugcggcucgg

SEQ ID NO: 10494 - RNA, 21 nt, Artificial Sequence
  Synthetic
agaugaugcggcucggcuggu

SEQ ID NO: 10495 - RNA, 21 nt, Artificial Sequence
  Synthetic
agcaccagccgagccgcauca

SEQ ID NO: 10496 - RNA, 21 nt, Artificial Sequence
  Synthetic
agccgagccgcaucaucuuuu

SEQ ID NO: 10497 - RNA, 21 nt, Artificial Sequence
  Synthetic
augaugcggcucggcuggugc

SEQ ID NO: 10498 - RNA, 21 nt, Artificial Sequence
  Synthetic
augcggcucggcuggugcuga

SEQ ID NO: 10499 - RNA, 21 nt, Artificial Sequence
  Synthetic
caccagccgagccgcaucauc

SEQ ID NO: 10500 - RNA, 21 nt, Artificial Sequence
  Synthetic
cagcaccagccgagccgcauc

SEQ ID NO: 10501 - RNA, 21 nt, Artificial Sequence
  Synthetic
cagccgagccgcaucaucuuu

SEQ ID NO: 10502 - RNA, 21 nt, Artificial Sequence
  Synthetic
ccagccgagccgcaucaucuu

SEQ ID NO: 10503 - RNA, 21 nt, Artificial Sequence
  Synthetic
ccgagccgcaucaucuuuucu

SEQ ID NO: 10504 - RNA, 21 nt, Artificial Sequence
  Synthetic
ccuugguguucagcaccagcc

SEQ ID NO: 10505 - RNA, 21 nt, Artificial Sequence
  Synthetic
cgagccgcaucaucuuuucuu

SEQ ID NO: 10506 - RNA, 21 nt, Artificial Sequence
  Synthetic
cggcucggcuggugcugaaca

SEQ ID NO: 10507 - RNA, 21 nt, Artificial Sequence
  Synthetic
cucggcuggugcugaacacca

SEQ ID NO: 10508 - RNA, 21 nt, Artificial Sequence
  Synthetic
cuugguguucagcaccagccg

SEQ ID NO: 10509 - RNA, 21 nt, Artificial Sequence
  Synthetic
gaaaagaugaugcggcucggc

SEQ ID NO: 10510 - RNA, 21 nt, Artificial Sequence
  Synthetic
gaaagaaaagaugaugcggcu

SEQ ID NO: 10511 - RNA, 21 nt, Artificial Sequence
  Synthetic
gaugaugcggcucggcuggug

SEQ ID NO: 10512 - RNA, 21 nt, Artificial Sequence
  Synthetic
gaugcggcucggcuggugcug

SEQ ID NO: 10513 - RNA, 21 nt, Artificial Sequence
  Synthetic
gcaccagccgagccgcaucau

SEQ ID NO: 10514 - RNA, 21 nt, Artificial Sequence
  Synthetic
gccgagccgcaucaucuuuuc

SEQ ID NO: 10515 - RNA, 21 nt, Artificial Sequence
  Synthetic
gcggcucggcuggugcugaac

SEQ ID NO: 10516 - RNA, 21 nt, Artificial Sequence
  Synthetic
gcucggcuggugcugaacacc

SEQ ID NO: 10517 - RNA, 21 nt, Artificial Sequence
  Synthetic
ggcucggcuggugcugaacac

SEQ ID NO: 10518 - RNA, 21 nt, Artificial Sequence
  Synthetic
gguguucagcaccagccgagc

SEQ ID NO: 10519 - RNA, 21 nt, Artificial Sequence
  Synthetic
guguucagcaccagccgagcc

SEQ ID NO: 10520 - RNA, 21 nt, Artificial Sequence
  Synthetic
guucagcaccagccgagccgc

SEQ ID NO: 10521 - RNA, 21 nt, Artificial Sequence
  Synthetic
guugaaagaaaagaugaugcg

SEQ ID NO: 10522 - RNA, 21 nt, Artificial Sequence
  Synthetic
ucagcaccagccgagccgcau

SEQ ID NO: 10523 - RNA, 21 nt, Artificial Sequence
  Synthetic
ucggcuggugcugaacaccaa

SEQ ID NO: 10524 - RNA, 21 nt, Artificial Sequence
  Synthetic
ugaaagaaaagaugaugcggc

SEQ ID NO: 10525 - RNA, 21 nt, Artificial Sequence
  Synthetic
ugaugcggcucggcuggugcu

SEQ ID NO: 10526 - RNA, 21 nt, Artificial Sequence
  Synthetic
ugcggcucggcuggugcugaa

SEQ ID NO: 10527 - RNA, 21 nt, Artificial Sequence
  Synthetic
ugguguucagcaccagccgag

SEQ ID NO: 10528 - RNA, 21 nt, Artificial Sequence
  Synthetic
uguucagcaccagccgagccg

SEQ ID NO: 10529 - RNA, 21 nt, Artificial Sequence
  Synthetic
uucagcaccagccgagccgca

SEQ ID NO: 10530 - RNA, 21 nt, Artificial Sequence
  Synthetic
uugaaagaaaagaugaugcgg

SEQ ID NO: 10531 - RNA, 21 nt, Artificial Sequence
  Synthetic
uugguguucagcaccagccga

SEQ ID NO: 10532 - RNA, 22 nt, Artificial Sequence
  Synthetic
aaaagaugaugcggcucggcug

SEQ ID NO: 10533 - RNA, 22 nt, Artificial Sequence
  Synthetic
aaagaaaagaugaugcggcucg

SEQ ID NO: 10534 - RNA, 22 nt, Artificial Sequence
  Synthetic
aaagaugaugcggcucggcugg

SEQ ID NO: 10535 - RNA, 22 nt, Artificial Sequence
  Synthetic
aagaaaagaugaugcggcucgg

SEQ ID NO: 10536 - RNA, 22 nt, Artificial Sequence
  Synthetic
aagaugaugcggcucggcuggu

SEQ ID NO: 10537 - RNA, 22 nt, Artificial Sequence
  Synthetic
accagccgagccgcaucaucuu

SEQ ID NO: 10538 - RNA, 22 nt, Artificial Sequence
  Synthetic
agaaaagaugaugcggcucggc

SEQ ID NO: 10539 - RNA, 22 nt, Artificial Sequence
  Synthetic
agaugaugcggcucggcuggug

SEQ ID NO: 10540 - RNA, 22 nt, Artificial Sequence
  Synthetic
agcaccagccgagccgcaucau

SEQ ID NO: 10541 - RNA, 22 nt, Artificial Sequence
  Synthetic
agccgagccgcaucaucuuuuc

SEQ ID NO: 10542 - RNA, 22 nt, Artificial Sequence
  Synthetic
augaugcggcucggcuggugcu

SEQ ID NO: 10543 - RNA, 22 nt, Artificial Sequence
  Synthetic
augcggcucggcuggugcugaa

SEQ ID NO: 10544 - RNA, 22 nt, Artificial Sequence
  Synthetic
caccagccgagccgcaucaucu

SEQ ID NO: 10545 - RNA, 22 nt, Artificial Sequence
  Synthetic
cagcaccagccgagccgcauca

SEQ ID NO: 10546 - RNA, 22 nt, Artificial Sequence
  Synthetic
cagccgagccgcaucaucuuuu

SEQ ID NO: 10547 - RNA, 22 nt, Artificial Sequence
  Synthetic
ccagccgagccgcaucaucuuu

SEQ ID NO: 10548 - RNA, 22 nt, Artificial Sequence
  Synthetic
ccgagccgcaucaucuuuucuu

SEQ ID NO: 10549 - RNA, 22 nt, Artificial Sequence
  Synthetic
ccuugguguucagcaccagccg

SEQ ID NO: 10550 - RNA, 22 nt, Artificial Sequence
  Synthetic
cgagccgcaucaucuuuucuuu

SEQ ID NO: 10551 - RNA, 22 nt, Artificial Sequence
  Synthetic
cggcucggcuggugcugaacac

SEQ ID NO: 10552 - RNA, 22 nt, Artificial Sequence
  Synthetic
cucggcuggugcugaacaccaa

SEQ ID NO: 10553 - RNA, 22 nt, Artificial Sequence
  Synthetic
cuugguguucagcaccagccga

SEQ ID NO: 10554 - RNA, 22 nt, Artificial Sequence
  Synthetic
gaaaagaugaugcggcucggcu

SEQ ID NO: 10555 - RNA, 22 nt, Artificial Sequence
  Synthetic
gaaagaaaagaugaugcggcuc

SEQ ID NO: 10556 - RNA, 22 nt, Artificial Sequence
  Synthetic
gaugaugcggcucggcuggugc

SEQ ID NO: 10557 - RNA, 22 nt, Artificial Sequence
  Synthetic
gaugcggcucggcuggugcuga

SEQ ID NO: 10558 - RNA, 22 nt, Artificial Sequence
  Synthetic
gcaccagccgagccgcaucauc

SEQ ID NO: 10559 - RNA, 22 nt, Artificial Sequence
  Synthetic
gccgagccgcaucaucuuuucu

SEQ ID NO: 10560 - RNA, 22 nt, Artificial Sequence
  Synthetic
gcggcucggcuggugcugaaca

SEQ ID NO: 10561 - RNA, 22 nt, Artificial Sequence
  Synthetic
gcucggcuggugcugaacacca

SEQ ID NO: 10562 - RNA, 22 nt, Artificial Sequence
  Synthetic
ggcucggcuggugcugaacacc

SEQ ID NO: 10563 - RNA, 22 nt, Artificial Sequence
  Synthetic
gguguucagcaccagccgagcc

SEQ ID NO: 10564 - RNA, 22 nt, Artificial Sequence
  Synthetic
guguucagcaccagccgagccg

SEQ ID NO: 10565 - RNA, 22 nt, Artificial Sequence
  Synthetic
guucagcaccagccgagccgca

SEQ ID NO: 10566 - RNA, 22 nt, Artificial Sequence
  Synthetic
guugaaagaaaagaugaugcgg

SEQ ID NO: 10567 - RNA, 22 nt, Artificial Sequence
  Synthetic
ucagcaccagccgagccgcauc

SEQ ID NO: 10568 - RNA, 22 nt, Artificial Sequence
  Synthetic
uccuugguguucagcaccagcc

SEQ ID NO: 10569 - RNA, 22 nt, Artificial Sequence
  Synthetic
ucggcuggugcugaacaccaag

SEQ ID NO: 10570 - RNA, 22 nt, Artificial Sequence
  Synthetic
ugaaagaaaagaugaugcggcu

SEQ ID NO: 10571 - RNA, 22 nt, Artificial Sequence
  Synthetic
ugaugcggcucggcuggugcug

SEQ ID NO: 10572 - RNA, 22 nt, Artificial Sequence
  Synthetic
ugcggcucggcuggugcugaac

SEQ ID NO: 10573 - RNA, 22 nt, Artificial Sequence
  Synthetic
ugguguucagcaccagccgagc

SEQ ID NO: 10574 - RNA, 22 nt, Artificial Sequence
  Synthetic
uguucagcaccagccgagccgc

SEQ ID NO: 10575 - RNA, 22 nt, Artificial Sequence
  Synthetic
uguugaaagaaaagaugaugcg

SEQ ID NO: 10576 - RNA, 22 nt, Artificial Sequence
  Synthetic
uucagcaccagccgagccgcau

SEQ ID NO: 10577 - RNA, 22 nt, Artificial Sequence
  Synthetic
uugaaagaaaagaugaugcggc

SEQ ID NO: 10578 - RNA, 22 nt, Artificial Sequence
  Synthetic
uugguguucagcaccagccgag

SEQ ID NO: 10579 - RNA, 20 nt, Artificial Sequence
  Synthetic
aaaagaugaugcggcugggg

SEQ ID NO: 10580 - RNA, 20 nt, Artificial Sequence
  Synthetic
aaagaugaugcggcuggggg

SEQ ID NO: 10581 - RNA, 20 nt, Artificial Sequence
  Synthetic
accagccgccccccagccgc

SEQ ID NO: 10582 - RNA, 20 nt, Artificial Sequence
  Synthetic
agaugaugcggcuggggggc

SEQ ID NO: 10583 - RNA, 20 nt, Artificial Sequence
  Synthetic
agcaccagccgccccccagc

SEQ ID NO: 10584 - RNA, 20 nt, Artificial Sequence
  Synthetic
agccgccccccagccgcauc

SEQ ID NO: 10585 - RNA, 20 nt, Artificial Sequence
  Synthetic
augaugcggcuggggggcgg

SEQ ID NO: 10586 - RNA, 20 nt, Artificial Sequence
  Synthetic
augcggcuggggggcggcug

SEQ ID NO: 10587 - RNA, 20 nt, Artificial Sequence
  Synthetic
caccagccgccccccagccg

SEQ ID NO: 10588 - RNA, 20 nt, Artificial Sequence
  Synthetic
cagcaccagccgccccccag

SEQ ID NO: 10589 - RNA, 20 nt, Artificial Sequence
  Synthetic
cagccgccccccagccgcau

SEQ ID NO: 10590 - RNA, 20 nt, Artificial Sequence
  Synthetic
ccagccgccccccagccgca

SEQ ID NO: 10591 - RNA, 20 nt, Artificial Sequence
  Synthetic
ccgccccccagccgcaucau

SEQ ID NO: 10592 - RNA, 20 nt, Artificial Sequence
  Synthetic
cgccccccagccgcaucauc

SEQ ID NO: 10593 - RNA, 20 nt, Artificial Sequence
  Synthetic
cggcuggggggcggcuggug

SEQ ID NO: 10594 - RNA, 20 nt, Artificial Sequence
  Synthetic
cuggggggcggcuggugcug

SEQ ID NO: 10595 - RNA, 20 nt, Artificial Sequence
  Synthetic
gaaaagaugaugcggcuggg

SEQ ID NO: 10596 - RNA, 20 nt, Artificial Sequence
  Synthetic
gaugaugcggcuggggggcg

SEQ ID NO: 10597 - RNA, 20 nt, Artificial Sequence
  Synthetic
gaugcggcuggggggcggcu

SEQ ID NO: 10598 - RNA, 20 nt, Artificial Sequence
  Synthetic
gcaccagccgccccccagcc

SEQ ID NO: 10599 - RNA, 20 nt, Artificial Sequence
  Synthetic
gccgccccccagccgcauca

SEQ ID NO: 10600 - RNA, 20 nt, Artificial Sequence
  Synthetic
gcggcuggggggcggcuggu

SEQ ID NO: 10601 - RNA, 20 nt, Artificial Sequence
  Synthetic
gcggcuggugcugaacacca

SEQ ID NO: 10602 - RNA, 20 nt, Artificial Sequence
  Synthetic
gcuggggggcggcuggugcu

SEQ ID NO: 10603 - RNA, 20 nt, Artificial Sequence
  Synthetic
ggcuggggggcggcuggugc

SEQ ID NO: 10604 - RNA, 20 nt, Artificial Sequence
  Synthetic
ggggggcggcuggugcugaa

SEQ ID NO: 10605 - RNA, 20 nt, Artificial Sequence
  Synthetic
gguguucagcaccagccgcc

SEQ ID NO: 10606 - RNA, 20 nt, Artificial Sequence
  Synthetic
guguucagcaccagccgccc

SEQ ID NO: 10607 - RNA, 20 nt, Artificial Sequence
  Synthetic
guucagcaccagccgccccc

SEQ ID NO: 10608 - RNA, 20 nt, Artificial Sequence
  Synthetic
ucagcaccagccgcccccca

SEQ ID NO: 10609 - RNA, 20 nt, Artificial Sequence
  Synthetic
ugaugcggcuggggggcggc

SEQ ID NO: 10610 - RNA, 20 nt, Artificial Sequence
  Synthetic
ugcggcuggggggcggcugg

SEQ ID NO: 10611 - RNA, 20 nt, Artificial Sequence
  Synthetic
uggggggcggcuggugcuga

SEQ ID NO: 10612 - RNA, 20 nt, Artificial Sequence
  Synthetic
ugguguucagcaccagccgc

SEQ ID NO: 10613 - RNA, 20 nt, Artificial Sequence
  Synthetic
uguucagcaccagccgcccc

SEQ ID NO: 10614 - RNA, 20 nt, Artificial Sequence
  Synthetic
uucagcaccagccgcccccc

SEQ ID NO: 10615 - RNA, 21 nt, Artificial Sequence
  Synthetic
aaaagaugaugcggcuggggg

SEQ ID NO: 10616 - RNA, 21 nt, Artificial Sequence
  Synthetic
aagaugaugcggcuggggggc

SEQ ID NO: 10617 - RNA, 21 nt, Artificial Sequence
  Synthetic
accagccgccccccagccgca

SEQ ID NO: 10618 - RNA, 21 nt, Artificial Sequence
  Synthetic
agaaaagaugaugcggcuggg

SEQ ID NO: 10619 - RNA, 21 nt, Artificial Sequence
  Synthetic
agaugaugcggcuggggggcg

SEQ ID NO: 10620 - RNA, 21 nt, Artificial Sequence
  Synthetic
agcaccagccgccccccagcc

SEQ ID NO: 10621 - RNA, 21 nt, Artificial Sequence
  Synthetic
agccgccccccagccgcauca

SEQ ID NO: 10622 - RNA, 21 nt, Artificial Sequence
  Synthetic
augaugcggcuggggggcggc

SEQ ID NO: 10623 - RNA, 21 nt, Artificial Sequence
  Synthetic
augcggcuggggggcggcugg

SEQ ID NO: 10624 - RNA, 21 nt, Artificial Sequence
  Synthetic
caccagccgccccccagccgc

SEQ ID NO: 10625 - RNA, 21 nt, Artificial Sequence
  Synthetic
cagcaccagccgccccccagc

SEQ ID NO: 10626 - RNA, 21 nt, Artificial Sequence
  Synthetic
cagccgccccccagccgcauc

SEQ ID NO: 10627 - RNA, 21 nt, Artificial Sequence
  Synthetic
ccagccgccccccagccgcau

SEQ ID NO: 10628 - RNA, 21 nt, Artificial Sequence
  Synthetic
ccgccccccagccgcaucauc

SEQ ID NO: 10629 - RNA, 21 nt, Artificial Sequence
  Synthetic
cgccccccagccgcaucaucu

SEQ ID NO: 10630 - RNA, 21 nt, Artificial Sequence
  Synthetic
cggcuggggggcggcuggugc

SEQ ID NO: 10631 - RNA, 21 nt, Artificial Sequence
  Synthetic
cuggggggcggcuggugcuga

SEQ ID NO: 10632 - RNA, 21 nt, Artificial Sequence
  Synthetic
gaaaagaugaugcggcugggg

SEQ ID NO: 10633 - RNA, 21 nt, Artificial Sequence
  Synthetic
gaugaugcggcuggggggcgg

SEQ ID NO: 10634 - RNA, 21 nt, Artificial Sequence
  Synthetic
gaugcggcuggggggcggcug

SEQ ID NO: 10635 - RNA, 21 nt, Artificial Sequence
  Synthetic
gcaccagccgccccccagccg

SEQ ID NO: 10636 - RNA, 21 nt, Artificial Sequence
  Synthetic
gccgccccccagccgcaucau

SEQ ID NO: 10637 - RNA, 21 nt, Artificial Sequence
  Synthetic
gcggcuggggggcggcuggug

SEQ ID NO: 10638 - RNA, 21 nt, Artificial Sequence
  Synthetic
gcggcuggugcugaacaccaa

SEQ ID NO: 10639 - RNA, 21 nt, Artificial Sequence
  Synthetic
gcuggggggcggcuggugcug

SEQ ID NO: 10640 - RNA, 21 nt, Artificial Sequence
  Synthetic
ggcggcuggugcugaacacca

SEQ ID NO: 10641 - RNA, 21 nt, Artificial Sequence
  Synthetic
ggcuggggggcggcuggugcu

SEQ ID NO: 10642 - RNA, 21 nt, Artificial Sequence
  Synthetic
gguguucagcaccagccgccc

SEQ ID NO: 10643 - RNA, 21 nt, Artificial Sequence
  Synthetic
guguucagcaccagccgcccc

SEQ ID NO: 10644 - RNA, 21 nt, Artificial Sequence
  Synthetic
guucagcaccagccgcccccc

SEQ ID NO: 10645 - RNA, 21 nt, Artificial Sequence
  Synthetic
ucagcaccagccgccccccag

SEQ ID NO: 10646 - RNA, 21 nt, Artificial Sequence
  Synthetic
ugaugcggcuggggggcggcu

SEQ ID NO: 10647 - RNA, 21 nt, Artificial Sequence
  Synthetic
ugcggcuggggggcggcuggu

SEQ ID NO: 10648 - RNA, 21 nt, Artificial Sequence
  Synthetic
uggggggcggcuggugcugaa

SEQ ID NO: 10649 - RNA, 21 nt, Artificial Sequence
  Synthetic
ugguguucagcaccagccgcc

SEQ ID NO: 10650 - RNA, 21 nt, Artificial Sequence
  Synthetic
uguucagcaccagccgccccc

SEQ ID NO: 10651 - RNA, 21 nt, Artificial Sequence
  Synthetic
uucagcaccagccgcccccca

SEQ ID NO: 10652 - RNA, 21 nt, Artificial Sequence
  Synthetic
uugguguucagcaccagccgc

SEQ ID NO: 10653 - RNA, 22 nt, Artificial Sequence
  Synthetic
aaagaugaugcggcuggggggc

SEQ ID NO: 10654 - RNA, 22 nt, Artificial Sequence
  Synthetic
aagaaaagaugaugcggcuggg

SEQ ID NO: 10655 - RNA, 22 nt, Artificial Sequence
  Synthetic
aagaugaugcggcuggggggcg

SEQ ID NO: 10656 - RNA, 22 nt, Artificial Sequence
  Synthetic
accagccgccccccagccgcau

SEQ ID NO: 10657 - RNA, 22 nt, Artificial Sequence
  Synthetic
agaaaagaugaugcggcugggg

SEQ ID NO: 10658 - RNA, 22 nt, Artificial Sequence
  Synthetic
agaugaugcggcuggggggcgg

SEQ ID NO: 10659 - RNA, 22 nt, Artificial Sequence
  Synthetic
agcaccagccgccccccagccg

SEQ ID NO: 10660 - RNA, 22 nt, Artificial Sequence
  Synthetic
agccgccccccagccgcaucau

SEQ ID NO: 10661 - RNA, 22 nt, Artificial Sequence
  Synthetic
augaugcggcuggggggcggcu

SEQ ID NO: 10662 - RNA, 22 nt, Artificial Sequence
  Synthetic
augcggcuggggggcggcuggu

SEQ ID NO: 10663 - RNA, 22 nt, Artificial Sequence
  Synthetic
caccagccgccccccagccgca

SEQ ID NO: 10664 - RNA, 22 nt, Artificial Sequence
  Synthetic
cagcaccagccgccccccagcc

SEQ ID NO: 10665 - RNA, 22 nt, Artificial Sequence
  Synthetic
cagccgccccccagccgcauca

SEQ ID NO: 10666 - RNA, 22 nt, Artificial Sequence
  Synthetic
ccagccgccccccagccgcauc

SEQ ID NO: 10667 - RNA, 22 nt, Artificial Sequence
  Synthetic
ccgccccccagccgcaucaucu

SEQ ID NO: 10668 - RNA, 22 nt, Artificial Sequence
  Synthetic
cgccccccagccgcaucaucuu

SEQ ID NO: 10669 - RNA, 22 nt, Artificial Sequence
  Synthetic
cggcuggggggcggcuggugcu

SEQ ID NO: 10670 - RNA, 22 nt, Artificial Sequence
  Synthetic
cuggggggcggcuggugcugaa

SEQ ID NO: 10671 - RNA, 22 nt, Artificial Sequence
  Synthetic
cuugguguucagcaccagccgc

SEQ ID NO: 10672 - RNA, 22 nt, Artificial Sequence
  Synthetic
gaaaagaugaugcggcuggggg

SEQ ID NO: 10673 - RNA, 22 nt, Artificial Sequence
  Synthetic
gaugaugcggcuggggggcggc

SEQ ID NO: 10674 - RNA, 22 nt, Artificial Sequence
  Synthetic
gaugcggcuggggggcggcugg

SEQ ID NO: 10675 - RNA, 22 nt, Artificial Sequence
  Synthetic
gcaccagccgccccccagccgc

SEQ ID NO: 10676 - RNA, 22 nt, Artificial Sequence
  Synthetic
gccgccccccagccgcaucauc

SEQ ID NO: 10677 - RNA, 22 nt, Artificial Sequence
  Synthetic
gcggcuggggggcggcuggugc

SEQ ID NO: 10678 - RNA, 22 nt, Artificial Sequence
  Synthetic
gcggcuggugcugaacaccaag

SEQ ID NO: 10679 - RNA, 22 nt, Artificial Sequence
  Synthetic
gcuggggggcggcuggugcuga

SEQ ID NO: 10680 - RNA, 22 nt, Artificial Sequence
  Synthetic
ggcggcuggugcugaacaccaa

SEQ ID NO: 10681 - RNA, 22 nt, Artificial Sequence
  Synthetic
ggcuggggggcggcuggugcug

SEQ ID NO: 10682 - RNA, 22 nt, Artificial Sequence
  Synthetic
gggcggcuggugcugaacacca

SEQ ID NO: 10683 - RNA, 22 nt, Artificial Sequence
  Synthetic
gguguucagcaccagccgcccc

SEQ ID NO: 10684 - RNA, 22 nt, Artificial Sequence
  Synthetic
guguucagcaccagccgccccc

SEQ ID NO: 10685 - RNA, 22 nt, Artificial Sequence
  Synthetic
guucagcaccagccgcccccca

SEQ ID NO: 10686 - RNA, 22 nt, Artificial Sequence
  Synthetic
ucagcaccagccgccccccagc

SEQ ID NO: 10687 - RNA, 22 nt, Artificial Sequence
  Synthetic
ugaugcggcuggggggcggcug

SEQ ID NO: 10688 - RNA, 22 nt, Artificial Sequence
  Synthetic
ugcggcuggggggcggcuggug

SEQ ID NO: 10689 - RNA, 22 nt, Artificial Sequence
  Synthetic
uggggggcggcuggugcugaac

SEQ ID NO: 10690 - RNA, 22 nt, Artificial Sequence
  Synthetic
ugguguucagcaccagccgccc

SEQ ID NO: 10691 - RNA, 22 nt, Artificial Sequence
  Synthetic
uguucagcaccagccgcccccc

SEQ ID NO: 10692 - RNA, 22 nt, Artificial Sequence
  Synthetic
uucagcaccagccgccccccag

SEQ ID NO: 10693 - RNA, 22 nt, Artificial Sequence
  Synthetic
uugguguucagcaccagccgcc

SEQ ID NO: 10694 - RNA, 20 nt, Artificial Sequence
  Synthetic
gggggguggcuggugcugaa

SEQ ID NO: 10695 - RNA, 20 nt, Artificial Sequence
  Synthetic
ggggguggcuggugcugaac

SEQ ID NO: 10696 - RNA, 20 nt, Artificial Sequence
  Synthetic
gggguggcuggugcugaaca

SEQ ID NO: 10697 - RNA, 20 nt, Artificial Sequence
  Synthetic
ggguggcuggugcugaacac

SEQ ID NO: 10698 - RNA, 20 nt, Artificial Sequence
  Synthetic
gguggcuggugcugaacacc

SEQ ID NO: 10699 - RNA, 20 nt, Artificial Sequence
  Synthetic
gguguucagcaccagccacc

SEQ ID NO: 10700 - RNA, 20 nt, Artificial Sequence
  Synthetic
guggcuggugcugaacacca

SEQ ID NO: 10701 - RNA, 20 nt, Artificial Sequence
  Synthetic
guguucagcaccagccaccc

SEQ ID NO: 10702 - RNA, 20 nt, Artificial Sequence
  Synthetic
guucagcaccagccaccccc

SEQ ID NO: 10703 - RNA, 20 nt, Artificial Sequence
  Synthetic
ugguguucagcaccagccac

SEQ ID NO: 10704 - RNA, 20 nt, Artificial Sequence
  Synthetic
uguucagcaccagccacccc

SEQ ID NO: 10705 - RNA, 20 nt, Artificial Sequence
  Synthetic
uucagcaccagccacccccc

SEQ ID NO: 10706 - RNA, 20 nt, Artificial Sequence
  Synthetic
uugguguucagcaccagcca

SEQ ID NO: 10707 - RNA, 21 nt, Artificial Sequence
  Synthetic
cuugguguucagcaccagcca

SEQ ID NO: 10708 - RNA, 21 nt, Artificial Sequence
  Synthetic
gggggguggcuggugcugaac

SEQ ID NO: 10709 - RNA, 21 nt, Artificial Sequence
  Synthetic
ggggguggcuggugcugaaca

SEQ ID NO: 10710 - RNA, 21 nt, Artificial Sequence
  Synthetic
gggguggcuggugcugaacac

SEQ ID NO: 10711 - RNA, 21 nt, Artificial Sequence
  Synthetic
ggguggcuggugcugaacacc

SEQ ID NO: 10712 - RNA, 21 nt, Artificial Sequence
  Synthetic
gguggcuggugcugaacacca

SEQ ID NO: 10713 - RNA, 21 nt, Artificial Sequence
  Synthetic
gguguucagcaccagccaccc

SEQ ID NO: 10714 - RNA, 21 nt, Artificial Sequence
  Synthetic
guggcuggugcugaacaccaa

SEQ ID NO: 10715 - RNA, 21 nt, Artificial Sequence
  Synthetic
guguucagcaccagccacccc

SEQ ID NO: 10716 - RNA, 21 nt, Artificial Sequence
  Synthetic
guucagcaccagccacccccc

SEQ ID NO: 10717 - RNA, 21 nt, Artificial Sequence
  Synthetic
ugguguucagcaccagccacc

SEQ ID NO: 10718 - RNA, 21 nt, Artificial Sequence
  Synthetic
uguucagcaccagccaccccc

SEQ ID NO: 10719 - RNA, 21 nt, Artificial Sequence
  Synthetic
uugguguucagcaccagccac

SEQ ID NO: 10720 - RNA, 22 nt, Artificial Sequence
  Synthetic
ccuugguguucagcaccagcca

SEQ ID NO: 10721 - RNA, 22 nt, Artificial Sequence
  Synthetic
cuugguguucagcaccagccac

SEQ ID NO: 10722 - RNA, 22 nt, Artificial Sequence
  Synthetic
gggggguggcuggugcugaaca

SEQ ID NO: 10723 - RNA, 22 nt, Artificial Sequence
  Synthetic
ggggguggcuggugcugaacac

SEQ ID NO: 10724 - RNA, 22 nt, Artificial Sequence
  Synthetic
gggguggcuggugcugaacacc

SEQ ID NO: 10725 - RNA, 22 nt, Artificial Sequence
  Synthetic
ggguggcuggugcugaacacca

SEQ ID NO: 10726 - RNA, 22 nt, Artificial Sequence
  Synthetic
gguggcuggugcugaacaccaa

SEQ ID NO: 10727 - RNA, 22 nt, Artificial Sequence
  Synthetic
gguguucagcaccagccacccc

SEQ ID NO: 10728 - RNA, 22 nt, Artificial Sequence
  Synthetic
guggcuggugcugaacaccaag

SEQ ID NO: 10729 - RNA, 22 nt, Artificial Sequence
  Synthetic
guguucagcaccagccaccccc

SEQ ID NO: 10730 - RNA, 22 nt, Artificial Sequence
  Synthetic
ugguguucagcaccagccaccc

SEQ ID NO: 10731 - RNA, 22 nt, Artificial Sequence
  Synthetic
uguucagcaccagccacccccc

SEQ ID NO: 10732 - RNA, 22 nt, Artificial Sequence
  Synthetic
uugguguucagcaccagccacc

SEQ ID NO: 10733 - RNA, 20 nt, Artificial Sequence
  Synthetic
ggggcuggugcugaacacca

SEQ ID NO: 10734 - RNA, 20 nt, Artificial Sequence
  Synthetic
gggggcuggugcugaacacc

SEQ ID NO: 10735 - RNA, 20 nt, Artificial Sequence
  Synthetic
ggggggcuggugcugaacac

SEQ ID NO: 10736 - RNA, 20 nt, Artificial Sequence
  Synthetic
gguguucagcaccagccccc

SEQ ID NO: 10737 - RNA, 20 nt, Artificial Sequence
  Synthetic
guguucagcaccagcccccc

SEQ ID NO: 10738 - RNA, 20 nt, Artificial Sequence
  Synthetic
ugguguucagcaccagcccc

SEQ ID NO: 10739 - RNA, 20 nt, Artificial Sequence
  Synthetic
uugguguucagcaccagccc

SEQ ID NO: 10740 - RNA, 21 nt, Artificial Sequence
  Synthetic
cuugguguucagcaccagccc

SEQ ID NO: 10741 - RNA, 21 nt, Artificial Sequence
  Synthetic
ggggcuggugcugaacaccaa

SEQ ID NO: 10742 - RNA, 21 nt, Artificial Sequence
  Synthetic
gggggcuggugcugaacacca

SEQ ID NO: 10743 - RNA, 21 nt, Artificial Sequence
  Synthetic
ggggggcuggugcugaacacc

SEQ ID NO: 10744 - RNA, 21 nt, Artificial Sequence
  Synthetic
gguguucagcaccagcccccc

SEQ ID NO: 10745 - RNA, 21 nt, Artificial Sequence
  Synthetic
ugguguucagcaccagccccc

SEQ ID NO: 10746 - RNA, 21 nt, Artificial Sequence
  Synthetic
uugguguucagcaccagcccc

SEQ ID NO: 10747 - RNA, 22 nt, Artificial Sequence
  Synthetic
ccuugguguucagcaccagccc

SEQ ID NO: 10748 - RNA, 22 nt, Artificial Sequence
  Synthetic
cuugguguucagcaccagcccc

SEQ ID NO: 10749 - RNA, 22 nt, Artificial Sequence
  Synthetic
ggggcuggugcugaacaccaag

SEQ ID NO: 10750 - RNA, 22 nt, Artificial Sequence
  Synthetic
gggggcuggugcugaacaccaa

SEQ ID NO: 10751 - RNA, 22 nt, Artificial Sequence
  Synthetic
ggggggcuggugcugaacacca

SEQ ID NO: 10752 - RNA, 22 nt, Artificial Sequence
  Synthetic
ugguguucagcaccagcccccc

SEQ ID NO: 10753 - RNA, 22 nt, Artificial Sequence
  Synthetic
uugguguucagcaccagccccc

SEQ ID NO: 10754 - RNA, 20 nt, Artificial Sequence
  Synthetic
aagaugaugcggcuggggga

SEQ ID NO: 10755 - RNA, 20 nt, Artificial Sequence
  Synthetic
accagccgcucccccagccg

SEQ ID NO: 10756 - RNA, 20 nt, Artificial Sequence
  Synthetic
agaaaagaugaugcggcugg

SEQ ID NO: 10757 - RNA, 20 nt, Artificial Sequence
  Synthetic
agaugaugcggcugggggag

SEQ ID NO: 10758 - RNA, 20 nt, Artificial Sequence
  Synthetic
agcaccagccgcucccccag

SEQ ID NO: 10759 - RNA, 20 nt, Artificial Sequence
  Synthetic
agccgcucccccagccgcau

SEQ ID NO: 10760 - RNA, 20 nt, Artificial Sequence
  Synthetic
augaugcggcugggggagcg

SEQ ID NO: 10761 - RNA, 20 nt, Artificial Sequence
  Synthetic
augcggcugggggagcggcu

SEQ ID NO: 10762 - RNA, 20 nt, Artificial Sequence
  Synthetic
caccagccgcucccccagcc

SEQ ID NO: 10763 - RNA, 20 nt, Artificial Sequence
  Synthetic
cagcaccagccgcuccccca

SEQ ID NO: 10764 - RNA, 20 nt, Artificial Sequence
  Synthetic
cagccgcucccccagccgca

SEQ ID NO: 10765 - RNA, 20 nt, Artificial Sequence
  Synthetic
ccagccgcucccccagccgc

SEQ ID NO: 10766 - RNA, 20 nt, Artificial Sequence
  Synthetic
ccgcucccccagccgcauca

SEQ ID NO: 10767 - RNA, 20 nt, Artificial Sequence
  Synthetic
cgcucccccagccgcaucau

SEQ ID NO: 10768 - RNA, 20 nt, Artificial Sequence
  Synthetic
cggcugggggagcggcuggu

SEQ ID NO: 10769 - RNA, 20 nt, Artificial Sequence
  Synthetic
cucccccagccgcaucaucu

SEQ ID NO: 10770 - RNA, 20 nt, Artificial Sequence
  Synthetic
cugggggagcggcuggugcu

SEQ ID NO: 10771 - RNA, 20 nt, Artificial Sequence
  Synthetic
gagcggcuggugcugaacac

SEQ ID NO: 10772 - RNA, 20 nt, Artificial Sequence
  Synthetic
gaugaugcggcugggggagc

SEQ ID NO: 10773 - RNA, 20 nt, Artificial Sequence
  Synthetic
gaugcggcugggggagcggc

SEQ ID NO: 10774 - RNA, 20 nt, Artificial Sequence
  Synthetic
gcaccagccgcucccccagc

SEQ ID NO: 10775 - RNA, 20 nt, Artificial Sequence
  Synthetic
gccgcucccccagccgcauc

SEQ ID NO: 10776 - RNA, 20 nt, Artificial Sequence
  Synthetic
gcggcugggggagcggcugg

SEQ ID NO: 10777 - RNA, 20 nt, Artificial Sequence
  Synthetic
gcucccccagccgcaucauc

SEQ ID NO: 10778 - RNA, 20 nt, Artificial Sequence
  Synthetic
gcugggggagcggcuggugc

SEQ ID NO: 10779 - RNA, 20 nt, Artificial Sequence
  Synthetic
ggagcggcuggugcugaaca

SEQ ID NO: 10780 - RNA, 20 nt, Artificial Sequence
  Synthetic
ggcugggggagcggcuggug

SEQ ID NO: 10781 - RNA, 20 nt, Artificial Sequence
  Synthetic
gggagcggcuggugcugaac

SEQ ID NO: 10782 - RNA, 20 nt, Artificial Sequence
  Synthetic
ggggagcggcuggugcugaa

SEQ ID NO: 10783 - RNA, 20 nt, Artificial Sequence
  Synthetic
gggggagcggcuggugcuga

SEQ ID NO: 10784 - RNA, 20 nt, Artificial Sequence
  Synthetic
gguguucagcaccagccgcu

SEQ ID NO: 10785 - RNA, 20 nt, Artificial Sequence
  Synthetic
guguucagcaccagccgcuc

SEQ ID NO: 10786 - RNA, 20 nt, Artificial Sequence
  Synthetic
guucagcaccagccgcuccc

SEQ ID NO: 10787 - RNA, 20 nt, Artificial Sequence
  Synthetic
ucagcaccagccgcuccccc

SEQ ID NO: 10788 - RNA, 20 nt, Artificial Sequence
  Synthetic
ugaugcggcugggggagcgg

SEQ ID NO: 10789 - RNA, 20 nt, Artificial Sequence
  Synthetic
ugcggcugggggagcggcug

SEQ ID NO: 10790 - RNA, 20 nt, Artificial Sequence
  Synthetic
ugggggagcggcuggugcug

SEQ ID NO: 10791 - RNA, 20 nt, Artificial Sequence
  Synthetic
uguucagcaccagccgcucc

SEQ ID NO: 10792 - RNA, 20 nt, Artificial Sequence
  Synthetic
uucagcaccagccgcucccc

SEQ ID NO: 10793 - RNA, 21 nt, Artificial Sequence
  Synthetic
aaagaugaugcggcuggggga

SEQ ID NO: 10794 - RNA, 21 nt, Artificial Sequence
  Synthetic
aagaaaagaugaugcggcugg

SEQ ID NO: 10795 - RNA, 21 nt, Artificial Sequence
  Synthetic
aagaugaugcggcugggggag

SEQ ID NO: 10796 - RNA, 21 nt, Artificial Sequence
  Synthetic
accagccgcucccccagccgc

SEQ ID NO: 10797 - RNA, 21 nt, Artificial Sequence
  Synthetic
agaugaugcggcugggggagc

SEQ ID NO: 10798 - RNA, 21 nt, Artificial Sequence
  Synthetic
agcaccagccgcucccccagc

SEQ ID NO: 10799 - RNA, 21 nt, Artificial Sequence
  Synthetic
agccgcucccccagccgcauc

SEQ ID NO: 10800 - RNA, 21 nt, Artificial Sequence
  Synthetic
augaugcggcugggggagcgg

SEQ ID NO: 10801 - RNA, 21 nt, Artificial Sequence
  Synthetic
augcggcugggggagcggcug

SEQ ID NO: 10802 - RNA, 21 nt, Artificial Sequence
  Synthetic
caccagccgcucccccagccg

SEQ ID NO: 10803 - RNA, 21 nt, Artificial Sequence
  Synthetic
cagcaccagccgcucccccag

SEQ ID NO: 10804 - RNA, 21 nt, Artificial Sequence
  Synthetic
cagccgcucccccagccgcau

SEQ ID NO: 10805 - RNA, 21 nt, Artificial Sequence
  Synthetic
ccagccgcucccccagccgca

SEQ ID NO: 10806 - RNA, 21 nt, Artificial Sequence
  Synthetic
ccgcucccccagccgcaucau

SEQ ID NO: 10807 - RNA, 21 nt, Artificial Sequence
  Synthetic
cgcucccccagccgcaucauc

SEQ ID NO: 10808 - RNA, 21 nt, Artificial Sequence
  Synthetic
cggcugggggagcggcuggug

SEQ ID NO: 10809 - RNA, 21 nt, Artificial Sequence
  Synthetic
cucccccagccgcaucaucuu

SEQ ID NO: 10810 - RNA, 21 nt, Artificial Sequence
  Synthetic
cugggggagcggcuggugcug

SEQ ID NO: 10811 - RNA, 21 nt, Artificial Sequence
  Synthetic
gagcggcuggugcugaacacc

SEQ ID NO: 10812 - RNA, 21 nt, Artificial Sequence
  Synthetic
gaugaugcggcugggggagcg

SEQ ID NO: 10813 - RNA, 21 nt, Artificial Sequence
  Synthetic
gaugcggcugggggagcggcu

SEQ ID NO: 10814 - RNA, 21 nt, Artificial Sequence
  Synthetic
gcaccagccgcucccccagcc

SEQ ID NO: 10815 - RNA, 21 nt, Artificial Sequence
  Synthetic
gccgcucccccagccgcauca

SEQ ID NO: 10816 - RNA, 21 nt, Artificial Sequence
  Synthetic
gcggcugggggagcggcuggu

SEQ ID NO: 10817 - RNA, 21 nt, Artificial Sequence
  Synthetic
gcucccccagccgcaucaucu

SEQ ID NO: 10818 - RNA, 21 nt, Artificial Sequence
  Synthetic
gcugggggagcggcuggugcu

SEQ ID NO: 10819 - RNA, 21 nt, Artificial Sequence
  Synthetic
ggagcggcuggugcugaacac

SEQ ID NO: 10820 - RNA, 21 nt, Artificial Sequence
  Synthetic
ggcugggggagcggcuggugc

SEQ ID NO: 10821 - RNA, 21 nt, Artificial Sequence
  Synthetic
gggagcggcuggugcugaaca

SEQ ID NO: 10822 - RNA, 21 nt, Artificial Sequence
  Synthetic
ggggagcggcuggugcugaac

SEQ ID NO: 10823 - RNA, 21 nt, Artificial Sequence
  Synthetic
gggggagcggcuggugcugaa

SEQ ID NO: 10824 - RNA, 21 nt, Artificial Sequence
  Synthetic
gguguucagcaccagccgcuc

SEQ ID NO: 10825 - RNA, 21 nt, Artificial Sequence
  Synthetic
guguucagcaccagccgcucc

SEQ ID NO: 10826 - RNA, 21 nt, Artificial Sequence
  Synthetic
guucagcaccagccgcucccc

SEQ ID NO: 10827 - RNA, 21 nt, Artificial Sequence
  Synthetic
ucagcaccagccgcuccccca

SEQ ID NO: 10828 - RNA, 21 nt, Artificial Sequence
  Synthetic
ugaugcggcugggggagcggc

SEQ ID NO: 10829 - RNA, 21 nt, Artificial Sequence
  Synthetic
ugcggcugggggagcggcugg

SEQ ID NO: 10830 - RNA, 21 nt, Artificial Sequence
  Synthetic
ugggggagcggcuggugcuga

SEQ ID NO: 10831 - RNA, 21 nt, Artificial Sequence
  Synthetic
ugguguucagcaccagccgcu

SEQ ID NO: 10832 - RNA, 21 nt, Artificial Sequence
  Synthetic
uguucagcaccagccgcuccc

SEQ ID NO: 10833 - RNA, 21 nt, Artificial Sequence
  Synthetic
uucagcaccagccgcuccccc

SEQ ID NO: 10834 - RNA, 22 nt, Artificial Sequence
  Synthetic
aaaagaugaugcggcuggggga

SEQ ID NO: 10835 - RNA, 22 nt, Artificial Sequence
  Synthetic
aaagaaaagaugaugcggcugg

SEQ ID NO: 10836 - RNA, 22 nt, Artificial Sequence
  Synthetic
aaagaugaugcggcugggggag

SEQ ID NO: 10837 - RNA, 22 nt, Artificial Sequence
  Synthetic
aagaugaugcggcugggggagc

SEQ ID NO: 10838 - RNA, 22 nt, Artificial Sequence
  Synthetic
accagccgcucccccagccgca

SEQ ID NO: 10839 - RNA, 22 nt, Artificial Sequence
  Synthetic
agaugaugcggcugggggagcg

SEQ ID NO: 10840 - RNA, 22 nt, Artificial Sequence
  Synthetic
agcaccagccgcucccccagcc

SEQ ID NO: 10841 - RNA, 22 nt, Artificial Sequence
  Synthetic
agccgcucccccagccgcauca

SEQ ID NO: 10842 - RNA, 22 nt, Artificial Sequence
  Synthetic
augaugcggcugggggagcggc

SEQ ID NO: 10843 - RNA, 22 nt, Artificial Sequence
  Synthetic
augcggcugggggagcggcugg

SEQ ID NO: 10844 - RNA, 22 nt, Artificial Sequence
  Synthetic
caccagccgcucccccagccgc

SEQ ID NO: 10845 - RNA, 22 nt, Artificial Sequence
  Synthetic
cagcaccagccgcucccccagc

SEQ ID NO: 10846 - RNA, 22 nt, Artificial Sequence
  Synthetic
cagccgcucccccagccgcauc

SEQ ID NO: 10847 - RNA, 22 nt, Artificial Sequence
  Synthetic
ccagccgcucccccagccgcau

SEQ ID NO: 10848 - RNA, 22 nt, Artificial Sequence
  Synthetic
ccgcucccccagccgcaucauc

SEQ ID NO: 10849 - RNA, 22 nt, Artificial Sequence
  Synthetic
cgcucccccagccgcaucaucu

SEQ ID NO: 10850 - RNA, 22 nt, Artificial Sequence
  Synthetic
cggcugggggagcggcuggugc

SEQ ID NO: 10851 - RNA, 22 nt, Artificial Sequence
  Synthetic
cucccccagccgcaucaucuuu

SEQ ID NO: 10852 - RNA, 22 nt, Artificial Sequence
  Synthetic
cugggggagcggcuggugcuga

SEQ ID NO: 10853 - RNA, 22 nt, Artificial Sequence
  Synthetic
gagcggcuggugcugaacacca

SEQ ID NO: 10854 - RNA, 22 nt, Artificial Sequence
  Synthetic
gaugaugcggcugggggagcgg

SEQ ID NO: 10855 - RNA, 22 nt, Artificial Sequence
  Synthetic
gaugcggcugggggagcggcug

SEQ ID NO: 10856 - RNA, 22 nt, Artificial Sequence
  Synthetic
gcaccagccgcucccccagccg

SEQ ID NO: 10857 - RNA, 22 nt, Artificial Sequence
  Synthetic
gccgcucccccagccgcaucau

SEQ ID NO: 10858 - RNA, 22 nt, Artificial Sequence
  Synthetic
gcggcugggggagcggcuggug

SEQ ID NO: 10859 - RNA, 22 nt, Artificial Sequence
  Synthetic
gcucccccagccgcaucaucuu

SEQ ID NO: 10860 - RNA, 22 nt, Artificial Sequence
  Synthetic
gcugggggagcggcuggugcug

SEQ ID NO: 10861 - RNA, 22 nt, Artificial Sequence
  Synthetic
ggagcggcuggugcugaacacc

SEQ ID NO: 10862 - RNA, 22 nt, Artificial Sequence
  Synthetic
ggcugggggagcggcuggugcu

SEQ ID NO: 10863 - RNA, 22 nt, Artificial Sequence
  Synthetic
gggagcggcuggugcugaacac

SEQ ID NO: 10864 - RNA, 22 nt, Artificial Sequence
  Synthetic
ggggagcggcuggugcugaaca

SEQ ID NO: 10865 - RNA, 22 nt, Artificial Sequence
  Synthetic
gggggagcggcuggugcugaac

SEQ ID NO: 10866 - RNA, 22 nt, Artificial Sequence
  Synthetic
gguguucagcaccagccgcucc

SEQ ID NO: 10867 - RNA, 22 nt, Artificial Sequence
  Synthetic
guguucagcaccagccgcuccc

SEQ ID NO: 10868 - RNA, 22 nt, Artificial Sequence
  Synthetic
guucagcaccagccgcuccccc

SEQ ID NO: 10869 - RNA, 22 nt, Artificial Sequence
  Synthetic
ucagcaccagccgcucccccag

SEQ ID NO: 10870 - RNA, 22 nt, Artificial Sequence
  Synthetic
ugaugcggcugggggagcggcu

SEQ ID NO: 10871 - RNA, 22 nt, Artificial Sequence
  Synthetic
ugcggcugggggagcggcuggu

SEQ ID NO: 10872 - RNA, 22 nt, Artificial Sequence
  Synthetic
ugggggagcggcuggugcugaa

SEQ ID NO: 10873 - RNA, 22 nt, Artificial Sequence
  Synthetic
ugguguucagcaccagccgcuc

SEQ ID NO: 10874 - RNA, 22 nt, Artificial Sequence
  Synthetic
uguucagcaccagccgcucccc

SEQ ID NO: 10875 - RNA, 22 nt, Artificial Sequence
  Synthetic
uucagcaccagccgcuccccca

SEQ ID NO: 10876 - RNA, 22 nt, Artificial Sequence
  Synthetic
uugguguucagcaccagccgcu

SEQ ID NO: 10877 - RNA, 20 nt, Artificial Sequence
  Synthetic
aaaagaugaugcggcuggug

SEQ ID NO: 10878 - RNA, 20 nt, Artificial Sequence
  Synthetic
aaagaugaugcggcuggugg

SEQ ID NO: 10879 - RNA, 20 nt, Artificial Sequence
  Synthetic
aagaaaagaugaugcggcug

SEQ ID NO: 10880 - RNA, 20 nt, Artificial Sequence
  Synthetic
aagaugaugcggcugguggg

SEQ ID NO: 10881 - RNA, 20 nt, Artificial Sequence
  Synthetic
accagccgccccaccagccg

SEQ ID NO: 10882 - RNA, 20 nt, Artificial Sequence
  Synthetic
agaugaugcggcuggugggg

SEQ ID NO: 10883 - RNA, 20 nt, Artificial Sequence
  Synthetic
agcaccagccgccccaccag

SEQ ID NO: 10884 - RNA, 20 nt, Artificial Sequence
  Synthetic
agccgccccaccagccgcau

SEQ ID NO: 10885 - RNA, 20 nt, Artificial Sequence
  Synthetic
augaugcggcugguggggcg

SEQ ID NO: 10886 - RNA, 20 nt, Artificial Sequence
  Synthetic
augcggcugguggggcggcu

SEQ ID NO: 10887 - RNA, 20 nt, Artificial Sequence
  Synthetic
caccagccgcaucaucuuuu

SEQ ID NO: 10888 - RNA, 20 nt, Artificial Sequence
  Synthetic
caccagccgccccaccagcc

SEQ ID NO: 10889 - RNA, 20 nt, Artificial Sequence
  Synthetic
cagcaccagccgccccacca

SEQ ID NO: 10890 - RNA, 20 nt, Artificial Sequence
  Synthetic
cagccgccccaccagccgca

SEQ ID NO: 10891 - RNA, 20 nt, Artificial Sequence
  Synthetic
ccaccagccgcaucaucuuu

SEQ ID NO: 10892 - RNA, 20 nt, Artificial Sequence
  Synthetic
ccagccgccccaccagccgc

SEQ ID NO: 10893 - RNA, 20 nt, Artificial Sequence
  Synthetic
cccaccagccgcaucaucuu

SEQ ID NO: 10894 - RNA, 20 nt, Artificial Sequence
  Synthetic
ccccaccagccgcaucaucu

SEQ ID NO: 10895 - RNA, 20 nt, Artificial Sequence
  Synthetic
ccgccccaccagccgcauca

SEQ ID NO: 10896 - RNA, 20 nt, Artificial Sequence
  Synthetic
cgccccaccagccgcaucau

SEQ ID NO: 10897 - RNA, 20 nt, Artificial Sequence
  Synthetic
cggcugguggggcggcuggu

SEQ ID NO: 10898 - RNA, 20 nt, Artificial Sequence
  Synthetic
cugguggggcggcuggugcu

SEQ ID NO: 10899 - RNA, 20 nt, Artificial Sequence
  Synthetic
gaaaagaugaugcggcuggu

SEQ ID NO: 10900 - RNA, 20 nt, Artificial Sequence
  Synthetic
gaugaugcggcugguggggc

SEQ ID NO: 10901 - RNA, 20 nt, Artificial Sequence
  Synthetic
gaugcggcugguggggcggc

SEQ ID NO: 10902 - RNA, 20 nt, Artificial Sequence
  Synthetic
gcaccagccgccccaccagc

SEQ ID NO: 10903 - RNA, 20 nt, Artificial Sequence
  Synthetic
gccccaccagccgcaucauc

SEQ ID NO: 10904 - RNA, 20 nt, Artificial Sequence
  Synthetic
gccgccccaccagccgcauc

SEQ ID NO: 10905 - RNA, 20 nt, Artificial Sequence
  Synthetic
gcggcugguggggcggcugg

SEQ ID NO: 10906 - RNA, 20 nt, Artificial Sequence
  Synthetic
gcugguggggcggcuggugc

SEQ ID NO: 10907 - RNA, 20 nt, Artificial Sequence
  Synthetic
ggcugguggggcggcuggug

SEQ ID NO: 10908 - RNA, 20 nt, Artificial Sequence
  Synthetic
gguggggcggcuggugcuga

SEQ ID NO: 10909 - RNA, 20 nt, Artificial Sequence
  Synthetic
guggggcggcuggugcugaa

SEQ ID NO: 10910 - RNA, 20 nt, Artificial Sequence
  Synthetic
guucagcaccagccgcccca

SEQ ID NO: 10911 - RNA, 20 nt, Artificial Sequence
  Synthetic
ucagcaccagccgccccacc

SEQ ID NO: 10912 - RNA, 20 nt, Artificial Sequence
  Synthetic
ugaugcggcugguggggcgg

SEQ ID NO: 10913 - RNA, 20 nt, Artificial Sequence
  Synthetic
ugcggcugguggggcggcug

SEQ ID NO: 10914 - RNA, 20 nt, Artificial Sequence
  Synthetic
ugguggggcggcuggugcug

SEQ ID NO: 10915 - RNA, 20 nt, Artificial Sequence
  Synthetic
uucagcaccagccgccccac

SEQ ID NO: 10916 - RNA, 21 nt, Artificial Sequence
  Synthetic
aaaagaugaugcggcuggugg

SEQ ID NO: 10917 - RNA, 21 nt, Artificial Sequence
  Synthetic
aaagaaaagaugaugcggcug

SEQ ID NO: 10918 - RNA, 21 nt, Artificial Sequence
  Synthetic
aaagaugaugcggcugguggg

SEQ ID NO: 10919 - RNA, 21 nt, Artificial Sequence
  Synthetic
aagaugaugcggcuggugggg

SEQ ID NO: 10920 - RNA, 21 nt, Artificial Sequence
  Synthetic
accagccgccccaccagccgc

SEQ ID NO: 10921 - RNA, 21 nt, Artificial Sequence
  Synthetic
agaaaagaugaugcggcuggu

SEQ ID NO: 10922 - RNA, 21 nt, Artificial Sequence
  Synthetic
agaugaugcggcugguggggc

SEQ ID NO: 10923 - RNA, 21 nt, Artificial Sequence
  Synthetic
agcaccagccgccccaccagc

SEQ ID NO: 10924 - RNA, 21 nt, Artificial Sequence
  Synthetic
agccgccccaccagccgcauc

SEQ ID NO: 10925 - RNA, 21 nt, Artificial Sequence
  Synthetic
augaugcggcugguggggcgg

SEQ ID NO: 10926 - RNA, 21 nt, Artificial Sequence
  Synthetic
augcggcugguggggcggcug

SEQ ID NO: 10927 - RNA, 21 nt, Artificial Sequence
  Synthetic
caccagccgcaucaucuuuuc

SEQ ID NO: 10928 - RNA, 21 nt, Artificial Sequence
  Synthetic
caccagccgccccaccagccg

SEQ ID NO: 10929 - RNA, 21 nt, Artificial Sequence
  Synthetic
cagcaccagccgccccaccag

SEQ ID NO: 10930 - RNA, 21 nt, Artificial Sequence
  Synthetic
cagccgccccaccagccgcau

SEQ ID NO: 10931 - RNA, 21 nt, Artificial Sequence
  Synthetic
ccaccagccgcaucaucuuuu

SEQ ID NO: 10932 - RNA, 21 nt, Artificial Sequence
  Synthetic
ccagccgccccaccagccgca

SEQ ID NO: 10933 - RNA, 21 nt, Artificial Sequence
  Synthetic
cccaccagccgcaucaucuuu

SEQ ID NO: 10934 - RNA, 21 nt, Artificial Sequence
  Synthetic
ccccaccagccgcaucaucuu

SEQ ID NO: 10935 - RNA, 21 nt, Artificial Sequence
  Synthetic
ccgccccaccagccgcaucau

SEQ ID NO: 10936 - RNA, 21 nt, Artificial Sequence
  Synthetic
cgccccaccagccgcaucauc

SEQ ID NO: 10937 - RNA, 21 nt, Artificial Sequence
  Synthetic
cggcugguggggcggcuggug

SEQ ID NO: 10938 - RNA, 21 nt, Artificial Sequence
  Synthetic
cugguggggcggcuggugcug

SEQ ID NO: 10939 - RNA, 21 nt, Artificial Sequence
  Synthetic
gaaaagaugaugcggcuggug

SEQ ID NO: 10940 - RNA, 21 nt, Artificial Sequence
  Synthetic
gaugaugcggcugguggggcg

SEQ ID NO: 10941 - RNA, 21 nt, Artificial Sequence
  Synthetic
gaugcggcugguggggcggcu

SEQ ID NO: 10942 - RNA, 21 nt, Artificial Sequence
  Synthetic
gcaccagccgccccaccagcc

SEQ ID NO: 10943 - RNA, 21 nt, Artificial Sequence
  Synthetic
gccccaccagccgcaucaucu

SEQ ID NO: 10944 - RNA, 21 nt, Artificial Sequence
  Synthetic
gccgccccaccagccgcauca

SEQ ID NO: 10945 - RNA, 21 nt, Artificial Sequence
  Synthetic
gcggcugguggggcggcuggu

SEQ ID NO: 10946 - RNA, 21 nt, Artificial Sequence
  Synthetic
gcugguggggcggcuggugcu

SEQ ID NO: 10947 - RNA, 21 nt, Artificial Sequence
  Synthetic
ggcugguggggcggcuggugc

SEQ ID NO: 10948 - RNA, 21 nt, Artificial Sequence
  Synthetic
gguggggcggcuggugcugaa

SEQ ID NO: 10949 - RNA, 21 nt, Artificial Sequence
  Synthetic
guggggcggcuggugcugaac

SEQ ID NO: 10950 - RNA, 21 nt, Artificial Sequence
  Synthetic
guucagcaccagccgccccac

SEQ ID NO: 10951 - RNA, 21 nt, Artificial Sequence
  Synthetic
ucagcaccagccgccccacca

SEQ ID NO: 10952 - RNA, 21 nt, Artificial Sequence
  Synthetic
ugaugcggcugguggggcggc

SEQ ID NO: 10953 - RNA, 21 nt, Artificial Sequence
  Synthetic
ugcggcugguggggcggcugg

SEQ ID NO: 10954 - RNA, 21 nt, Artificial Sequence
  Synthetic
ugguggggcggcuggugcuga

SEQ ID NO: 10955 - RNA, 21 nt, Artificial Sequence
  Synthetic
uguucagcaccagccgcccca

SEQ ID NO: 10956 - RNA, 21 nt, Artificial Sequence
  Synthetic
uucagcaccagccgccccacc

SEQ ID NO: 10957 - RNA, 22 nt, Artificial Sequence
  Synthetic
aaaagaugaugcggcugguggg

SEQ ID NO: 10958 - RNA, 22 nt, Artificial Sequence
  Synthetic
aaagaugaugcggcuggugggg

SEQ ID NO: 10959 - RNA, 22 nt, Artificial Sequence
  Synthetic
aagaaaagaugaugcggcuggu

SEQ ID NO: 10960 - RNA, 22 nt, Artificial Sequence
  Synthetic
aagaugaugcggcugguggggc

SEQ ID NO: 10961 - RNA, 22 nt, Artificial Sequence
  Synthetic
accagccgccccaccagccgca

SEQ ID NO: 10962 - RNA, 22 nt, Artificial Sequence
  Synthetic
agaaaagaugaugcggcuggug

SEQ ID NO: 10963 - RNA, 22 nt, Artificial Sequence
  Synthetic
agaugaugcggcugguggggcg

SEQ ID NO: 10964 - RNA, 22 nt, Artificial Sequence
  Synthetic
agcaccagccgccccaccagcc

SEQ ID NO: 10965 - RNA, 22 nt, Artificial Sequence
  Synthetic
agccgccccaccagccgcauca

SEQ ID NO: 10966 - RNA, 22 nt, Artificial Sequence
  Synthetic
augaugcggcugguggggcggc

SEQ ID NO: 10967 - RNA, 22 nt, Artificial Sequence
  Synthetic
augcggcugguggggcggcugg

SEQ ID NO: 10968 - RNA, 22 nt, Artificial Sequence
  Synthetic
caccagccgcaucaucuuuucu

SEQ ID NO: 10969 - RNA, 22 nt, Artificial Sequence
  Synthetic
caccagccgccccaccagccgc

SEQ ID NO: 10970 - RNA, 22 nt, Artificial Sequence
  Synthetic
cagcaccagccgccccaccagc

SEQ ID NO: 10971 - RNA, 22 nt, Artificial Sequence
  Synthetic
cagccgccccaccagccgcauc

SEQ ID NO: 10972 - RNA, 22 nt, Artificial Sequence
  Synthetic
ccaccagccgcaucaucuuuuc

SEQ ID NO: 10973 - RNA, 22 nt, Artificial Sequence
  Synthetic
ccagccgccccaccagccgcau

SEQ ID NO: 10974 - RNA, 22 nt, Artificial Sequence
  Synthetic
cccaccagccgcaucaucuuuu

SEQ ID NO: 10975 - RNA, 22 nt, Artificial Sequence
  Synthetic
ccccaccagccgcaucaucuuu

SEQ ID NO: 10976 - RNA, 22 nt, Artificial Sequence
  Synthetic
ccgccccaccagccgcaucauc

SEQ ID NO: 10977 - RNA, 22 nt, Artificial Sequence
  Synthetic
cgccccaccagccgcaucaucu

SEQ ID NO: 10978 - RNA, 22 nt, Artificial Sequence
  Synthetic
cggcugguggggcggcuggugc

SEQ ID NO: 10979 - RNA, 22 nt, Artificial Sequence
  Synthetic
cugguggggcggcuggugcuga

SEQ ID NO: 10980 - RNA, 22 nt, Artificial Sequence
  Synthetic
gaaaagaugaugcggcuggugg

SEQ ID NO: 10981 - RNA, 22 nt, Artificial Sequence
  Synthetic
gaaagaaaagaugaugcggcug

SEQ ID NO: 10982 - RNA, 22 nt, Artificial Sequence
  Synthetic
gaugaugcggcugguggggcgg

SEQ ID NO: 10983 - RNA, 22 nt, Artificial Sequence
  Synthetic
gaugcggcugguggggcggcug

SEQ ID NO: 10984 - RNA, 22 nt, Artificial Sequence
  Synthetic
gcaccagccgccccaccagccg

SEQ ID NO: 10985 - RNA, 22 nt, Artificial Sequence
  Synthetic
gccccaccagccgcaucaucuu

SEQ ID NO: 10986 - RNA, 22 nt, Artificial Sequence
  Synthetic
gccgccccaccagccgcaucau

SEQ ID NO: 10987 - RNA, 22 nt, Artificial Sequence
  Synthetic
gcggcugguggggcggcuggug

SEQ ID NO: 10988 - RNA, 22 nt, Artificial Sequence
  Synthetic
gcugguggggcggcuggugcug

SEQ ID NO: 10989 - RNA, 22 nt, Artificial Sequence
  Synthetic
ggcugguggggcggcuggugcu

SEQ ID NO: 10990 - RNA, 22 nt, Artificial Sequence
  Synthetic
gguggggcggcuggugcugaac

SEQ ID NO: 10991 - RNA, 22 nt, Artificial Sequence
  Synthetic
guggggcggcuggugcugaaca

SEQ ID NO: 10992 - RNA, 22 nt, Artificial Sequence
  Synthetic
guguucagcaccagccgcccca

SEQ ID NO: 10993 - RNA, 22 nt, Artificial Sequence
  Synthetic
guucagcaccagccgccccacc

SEQ ID NO: 10994 - RNA, 22 nt, Artificial Sequence
  Synthetic
ucagcaccagccgccccaccag

SEQ ID NO: 10995 - RNA, 22 nt, Artificial Sequence
  Synthetic
ugaugcggcugguggggcggcu

SEQ ID NO: 10996 - RNA, 22 nt, Artificial Sequence
  Synthetic
ugcggcugguggggcggcuggu

SEQ ID NO: 10997 - RNA, 22 nt, Artificial Sequence
  Synthetic
ugguggggcggcuggugcugaa

SEQ ID NO: 10998 - RNA, 22 nt, Artificial Sequence
  Synthetic
uguucagcaccagccgccccac

SEQ ID NO: 10999 - RNA, 22 nt, Artificial Sequence
  Synthetic
uucagcaccagccgccccacca

SEQ ID NO: 11000 - RNA, 20 nt, Artificial Sequence
  Synthetic
aaaagaugaugcggcuggcg

SEQ ID NO: 11001 - RNA, 20 nt, Artificial Sequence
  Synthetic
aaagaugaugcggcuggcgg

SEQ ID NO: 11002 - RNA, 20 nt, Artificial Sequence
  Synthetic
aagaugaugcggcuggcggg

SEQ ID NO: 11003 - RNA, 20 nt, Artificial Sequence
  Synthetic
accagccgccccgccagccg

SEQ ID NO: 11004 - RNA, 20 nt, Artificial Sequence
  Synthetic
agaugaugcggcuggcgggg

SEQ ID NO: 11005 - RNA, 20 nt, Artificial Sequence
  Synthetic
agcaccagccgccccgccag

SEQ ID NO: 11006 - RNA, 20 nt, Artificial Sequence
  Synthetic
agccgccccgccagccgcau

SEQ ID NO: 11007 - RNA, 20 nt, Artificial Sequence
  Synthetic
augaugcggcuggcggggcg

SEQ ID NO: 11008 - RNA, 20 nt, Artificial Sequence
  Synthetic
augcggcuggcggggcggcu

SEQ ID NO: 11009 - RNA, 20 nt, Artificial Sequence
  Synthetic
caccagccgccccgccagcc

SEQ ID NO: 11010 - RNA, 20 nt, Artificial Sequence
  Synthetic
cagcaccagccgccccgcca

SEQ ID NO: 11011 - RNA, 20 nt, Artificial Sequence
  Synthetic
cagccgccccgccagccgca

SEQ ID NO: 11012 - RNA, 20 nt, Artificial Sequence
  Synthetic
ccagccgccccgccagccgc

SEQ ID NO: 11013 - RNA, 20 nt, Artificial Sequence
  Synthetic
ccccgccagccgcaucaucu

SEQ ID NO: 11014 - RNA, 20 nt, Artificial Sequence
  Synthetic
cccgccagccgcaucaucuu

SEQ ID NO: 11015 - RNA, 20 nt, Artificial Sequence
  Synthetic
ccgccagccgcaucaucuuu

SEQ ID NO: 11016 - RNA, 20 nt, Artificial Sequence
  Synthetic
ccgccccgccagccgcauca

SEQ ID NO: 11017 - RNA, 20 nt, Artificial Sequence
  Synthetic
cgccagccgcaucaucuuuu

SEQ ID NO: 11018 - RNA, 20 nt, Artificial Sequence
  Synthetic
cgccccgccagccgcaucau

SEQ ID NO: 11019 - RNA, 20 nt, Artificial Sequence
  Synthetic
cggcuggcggggcggcuggu

SEQ ID NO: 11020 - RNA, 20 nt, Artificial Sequence
  Synthetic
cuggcggggcggcuggugcu

SEQ ID NO: 11021 - RNA, 20 nt, Artificial Sequence
  Synthetic
gaaaagaugaugcggcuggc

SEQ ID NO: 11022 - RNA, 20 nt, Artificial Sequence
  Synthetic
gaugaugcggcuggcggggc

SEQ ID NO: 11023 - RNA, 20 nt, Artificial Sequence
  Synthetic
gaugcggcuggcggggcggc

SEQ ID NO: 11024 - RNA, 20 nt, Artificial Sequence
  Synthetic
gcaccagccgccccgccagc

SEQ ID NO: 11025 - RNA, 20 nt, Artificial Sequence
  Synthetic
gccccgccagccgcaucauc

SEQ ID NO: 11026 - RNA, 20 nt, Artificial Sequence
  Synthetic
gccgccccgccagccgcauc

SEQ ID NO: 11027 - RNA, 20 nt, Artificial Sequence
  Synthetic
gcggcuggcggggcggcugg

SEQ ID NO: 11028 - RNA, 20 nt, Artificial Sequence
  Synthetic
gcggggcggcuggugcugaa

SEQ ID NO: 11029 - RNA, 20 nt, Artificial Sequence
  Synthetic
gcuggcggggcggcuggugc

SEQ ID NO: 11030 - RNA, 20 nt, Artificial Sequence
  Synthetic
ggcggggcggcuggugcuga

SEQ ID NO: 11031 - RNA, 20 nt, Artificial Sequence
  Synthetic
ggcuggcggggcggcuggug

SEQ ID NO: 11032 - RNA, 20 nt, Artificial Sequence
  Synthetic
guucagcaccagccgccccg

SEQ ID NO: 11033 - RNA, 20 nt, Artificial Sequence
  Synthetic
ucagcaccagccgccccgcc

SEQ ID NO: 11034 - RNA, 20 nt, Artificial Sequence
  Synthetic
ugaugcggcuggcggggcgg

SEQ ID NO: 11035 - RNA, 20 nt, Artificial Sequence
  Synthetic
ugcggcuggcggggcggcug

SEQ ID NO: 11036 - RNA, 20 nt, Artificial Sequence
  Synthetic
uggcggggcggcuggugcug

SEQ ID NO: 11037 - RNA, 20 nt, Artificial Sequence
  Synthetic
uucagcaccagccgccccgc

SEQ ID NO: 11038 - RNA, 21 nt, Artificial Sequence
  Synthetic
aaaagaugaugcggcuggcgg

SEQ ID NO: 11039 - RNA, 21 nt, Artificial Sequence
  Synthetic
aaagaugaugcggcuggcggg

SEQ ID NO: 11040 - RNA, 21 nt, Artificial Sequence
  Synthetic
aagaugaugcggcuggcgggg

SEQ ID NO: 11041 - RNA, 21 nt, Artificial Sequence
  Synthetic
accagccgccccgccagccgc

SEQ ID NO: 11042 - RNA, 21 nt, Artificial Sequence
  Synthetic
agaaaagaugaugcggcuggc

SEQ ID NO: 11043 - RNA, 21 nt, Artificial Sequence
  Synthetic
agaugaugcggcuggcggggc

SEQ ID NO: 11044 - RNA, 21 nt, Artificial Sequence
  Synthetic
agcaccagccgccccgccagc

SEQ ID NO: 11045 - RNA, 21 nt, Artificial Sequence
  Synthetic
agccgccccgccagccgcauc

SEQ ID NO: 11046 - RNA, 21 nt, Artificial Sequence
  Synthetic
augaugcggcuggcggggcgg

SEQ ID NO: 11047 - RNA, 21 nt, Artificial Sequence
  Synthetic
augcggcuggcggggcggcug

SEQ ID NO: 11048 - RNA, 21 nt, Artificial Sequence
  Synthetic
caccagccgccccgccagccg

SEQ ID NO: 11049 - RNA, 21 nt, Artificial Sequence
  Synthetic
cagcaccagccgccccgccag

SEQ ID NO: 11050 - RNA, 21 nt, Artificial Sequence
  Synthetic
cagccgccccgccagccgcau

SEQ ID NO: 11051 - RNA, 21 nt, Artificial Sequence
  Synthetic
ccagccgccccgccagccgca

SEQ ID NO: 11052 - RNA, 21 nt, Artificial Sequence
  Synthetic
ccccgccagccgcaucaucuu

SEQ ID NO: 11053 - RNA, 21 nt, Artificial Sequence
  Synthetic
cccgccagccgcaucaucuuu

SEQ ID NO: 11054 - RNA, 21 nt, Artificial Sequence
  Synthetic
ccgccagccgcaucaucuuuu

SEQ ID NO: 11055 - RNA, 21 nt, Artificial Sequence
  Synthetic
ccgccccgccagccgcaucau

SEQ ID NO: 11056 - RNA, 21 nt, Artificial Sequence
  Synthetic
cgccagccgcaucaucuuuuc

SEQ ID NO: 11057 - RNA, 21 nt, Artificial Sequence
  Synthetic
cgccccgccagccgcaucauc

SEQ ID NO: 11058 - RNA, 21 nt, Artificial Sequence
  Synthetic
cggcuggcggggcggcuggug

SEQ ID NO: 11059 - RNA, 21 nt, Artificial Sequence
  Synthetic
cuggcggggcggcuggugcug

SEQ ID NO: 11060 - RNA, 21 nt, Artificial Sequence
  Synthetic
gaaaagaugaugcggcuggcg

SEQ ID NO: 11061 - RNA, 21 nt, Artificial Sequence
  Synthetic
gaugaugcggcuggcggggcg

SEQ ID NO: 11062 - RNA, 21 nt, Artificial Sequence
  Synthetic
gaugcggcuggcggggcggcu

SEQ ID NO: 11063 - RNA, 21 nt, Artificial Sequence
  Synthetic
gcaccagccgccccgccagcc

SEQ ID NO: 11064 - RNA, 21 nt, Artificial Sequence
  Synthetic
gccccgccagccgcaucaucu

SEQ ID NO: 11065 - RNA, 21 nt, Artificial Sequence
  Synthetic
gccgccccgccagccgcauca

SEQ ID NO: 11066 - RNA, 21 nt, Artificial Sequence
  Synthetic
gcggcuggcggggcggcuggu

SEQ ID NO: 11067 - RNA, 21 nt, Artificial Sequence
  Synthetic
gcggggcggcuggugcugaac

SEQ ID NO: 11068 - RNA, 21 nt, Artificial Sequence
  Synthetic
gcuggcggggcggcuggugcu

SEQ ID NO: 11069 - RNA, 21 nt, Artificial Sequence
  Synthetic
ggcggggcggcuggugcugaa

SEQ ID NO: 11070 - RNA, 21 nt, Artificial Sequence
  Synthetic
ggcuggcggggcggcuggugc

SEQ ID NO: 11071 - RNA, 21 nt, Artificial Sequence
  Synthetic
guucagcaccagccgccccgc

SEQ ID NO: 11072 - RNA, 21 nt, Artificial Sequence
  Synthetic
ucagcaccagccgccccgcca

SEQ ID NO: 11073 - RNA, 21 nt, Artificial Sequence
  Synthetic
ugaugcggcuggcggggcggc

SEQ ID NO: 11074 - RNA, 21 nt, Artificial Sequence
  Synthetic
ugcggcuggcggggcggcugg

SEQ ID NO: 11075 - RNA, 21 nt, Artificial Sequence
  Synthetic
uggcggggcggcuggugcuga

SEQ ID NO: 11076 - RNA, 21 nt, Artificial Sequence
  Synthetic
uguucagcaccagccgccccg

SEQ ID NO: 11077 - RNA, 21 nt, Artificial Sequence
  Synthetic
uucagcaccagccgccccgcc

SEQ ID NO: 11078 - RNA, 22 nt, Artificial Sequence
  Synthetic
aaaagaugaugcggcuggcggg

SEQ ID NO: 11079 - RNA, 22 nt, Artificial Sequence
  Synthetic
aaagaugaugcggcuggcgggg

SEQ ID NO: 11080 - RNA, 22 nt, Artificial Sequence
  Synthetic
aagaaaagaugaugcggcuggc

SEQ ID NO: 11081 - RNA, 22 nt, Artificial Sequence
  Synthetic
aagaugaugcggcuggcggggc

SEQ ID NO: 11082 - RNA, 22 nt, Artificial Sequence
  Synthetic
accagccgccccgccagccgca

SEQ ID NO: 11083 - RNA, 22 nt, Artificial Sequence
  Synthetic
agaaaagaugaugcggcuggcg

SEQ ID NO: 11084 - RNA, 22 nt, Artificial Sequence
  Synthetic
agaugaugcggcuggcggggcg

SEQ ID NO: 11085 - RNA, 22 nt, Artificial Sequence
  Synthetic
agcaccagccgccccgccagcc

SEQ ID NO: 11086 - RNA, 22 nt, Artificial Sequence
  Synthetic
agccgccccgccagccgcauca

SEQ ID NO: 11087 - RNA, 22 nt, Artificial Sequence
  Synthetic
augaugcggcuggcggggcggc

SEQ ID NO: 11088 - RNA, 22 nt, Artificial Sequence
  Synthetic
augcggcuggcggggcggcugg

SEQ ID NO: 11089 - RNA, 22 nt, Artificial Sequence
  Synthetic
caccagccgccccgccagccgc

SEQ ID NO: 11090 - RNA, 22 nt, Artificial Sequence
  Synthetic
cagcaccagccgccccgccagc

SEQ ID NO: 11091 - RNA, 22 nt, Artificial Sequence
  Synthetic
cagccgccccgccagccgcauc

SEQ ID NO: 11092 - RNA, 22 nt, Artificial Sequence
  Synthetic
ccagccgccccgccagccgcau

SEQ ID NO: 11093 - RNA, 22 nt, Artificial Sequence
  Synthetic
ccccgccagccgcaucaucuuu

SEQ ID NO: 11094 - RNA, 22 nt, Artificial Sequence
  Synthetic
cccgccagccgcaucaucuuuu

SEQ ID NO: 11095 - RNA, 22 nt, Artificial Sequence
  Synthetic
ccgccagccgcaucaucuuuuc

SEQ ID NO: 11096 - RNA, 22 nt, Artificial Sequence
  Synthetic
ccgccccgccagccgcaucauc

SEQ ID NO: 11097 - RNA, 22 nt, Artificial Sequence
  Synthetic
cgccagccgcaucaucuuuucu

SEQ ID NO: 11098 - RNA, 22 nt, Artificial Sequence
  Synthetic
cgccccgccagccgcaucaucu

SEQ ID NO: 11099 - RNA, 22 nt, Artificial Sequence
  Synthetic
cggcuggcggggcggcuggugc

SEQ ID NO: 11100 - RNA, 22 nt, Artificial Sequence
  Synthetic
cuggcggggcggcuggugcuga

SEQ ID NO: 11101 - RNA, 22 nt, Artificial Sequence
  Synthetic
gaaaagaugaugcggcuggcgg

SEQ ID NO: 11102 - RNA, 22 nt, Artificial Sequence
  Synthetic
gaugaugcggcuggcggggcgg

SEQ ID NO: 11103 - RNA, 22 nt, Artificial Sequence
  Synthetic
gaugcggcuggcggggcggcug

SEQ ID NO: 11104 - RNA, 22 nt, Artificial Sequence
  Synthetic
gcaccagccgccccgccagccg

SEQ ID NO: 11105 - RNA, 22 nt, Artificial Sequence
  Synthetic
gccccgccagccgcaucaucuu

SEQ ID NO: 11106 - RNA, 22 nt, Artificial Sequence
  Synthetic
gccgccccgccagccgcaucau

SEQ ID NO: 11107 - RNA, 22 nt, Artificial Sequence
  Synthetic
gcggcuggcggggcggcuggug

SEQ ID NO: 11108 - RNA, 22 nt, Artificial Sequence
  Synthetic
gcggggcggcuggugcugaaca

SEQ ID NO: 11109 - RNA, 22 nt, Artificial Sequence
  Synthetic
gcuggcggggcggcuggugcug

SEQ ID NO: 11110 - RNA, 22 nt, Artificial Sequence
  Synthetic
ggcggggcggcuggugcugaac

SEQ ID NO: 11111 - RNA, 22 nt, Artificial Sequence
  Synthetic
ggcuggcggggcggcuggugcu

SEQ ID NO: 11112 - RNA, 22 nt, Artificial Sequence
  Synthetic
guguucagcaccagccgccccg

SEQ ID NO: 11113 - RNA, 22 nt, Artificial Sequence
  Synthetic
guucagcaccagccgccccgcc

SEQ ID NO: 11114 - RNA, 22 nt, Artificial Sequence
  Synthetic
ucagcaccagccgccccgccag

SEQ ID NO: 11115 - RNA, 22 nt, Artificial Sequence
  Synthetic
ugaugcggcuggcggggcggcu

SEQ ID NO: 11116 - RNA, 22 nt, Artificial Sequence
  Synthetic
ugcggcuggcggggcggcuggu

SEQ ID NO: 11117 - RNA, 22 nt, Artificial Sequence
  Synthetic
uggcggggcggcuggugcugaa

SEQ ID NO: 11118 - RNA, 22 nt, Artificial Sequence
  Synthetic
uguucagcaccagccgccccgc

SEQ ID NO: 11119 - RNA, 22 nt, Artificial Sequence
  Synthetic
uucagcaccagccgccccgcca

SEQ ID NO: 11120 - RNA, 20 nt, Artificial Sequence
  Synthetic
aaaagaugaugcggcugugg

SEQ ID NO: 11121 - RNA, 20 nt, Artificial Sequence
  Synthetic
aaagaugaugcggcuguggg

SEQ ID NO: 11122 - RNA, 20 nt, Artificial Sequence
  Synthetic
aagaugaugcggcugugggg

SEQ ID NO: 11123 - RNA, 20 nt, Artificial Sequence
  Synthetic
accagccgcccccacagccg

SEQ ID NO: 11124 - RNA, 20 nt, Artificial Sequence
  Synthetic
agaaaagaugaugcggcugu

SEQ ID NO: 11125 - RNA, 20 nt, Artificial Sequence
  Synthetic
agaugaugcggcuguggggg

SEQ ID NO: 11126 - RNA, 20 nt, Artificial Sequence
  Synthetic
agcaccagccgcccccacag

SEQ ID NO: 11127 - RNA, 20 nt, Artificial Sequence
  Synthetic
agccgcccccacagccgcau

SEQ ID NO: 11128 - RNA, 20 nt, Artificial Sequence
  Synthetic
augaugcggcugugggggcg

SEQ ID NO: 11129 - RNA, 20 nt, Artificial Sequence
  Synthetic
augcggcugugggggcggcu

SEQ ID NO: 11130 - RNA, 20 nt, Artificial Sequence
  Synthetic
cacagccgcaucaucuuuuc

SEQ ID NO: 11131 - RNA, 20 nt, Artificial Sequence
  Synthetic
caccagccgcccccacagcc

SEQ ID NO: 11132 - RNA, 20 nt, Artificial Sequence
  Synthetic
cagcaccagccgcccccaca

SEQ ID NO: 11133 - RNA, 20 nt, Artificial Sequence
  Synthetic
cagccgcccccacagccgca

SEQ ID NO: 11134 - RNA, 20 nt, Artificial Sequence
  Synthetic
ccacagccgcaucaucuuuu

SEQ ID NO: 11135 - RNA, 20 nt, Artificial Sequence
  Synthetic
ccagccgcccccacagccgc

SEQ ID NO: 11136 - RNA, 20 nt, Artificial Sequence
  Synthetic
cccacagccgcaucaucuuu

SEQ ID NO: 11137 - RNA, 20 nt, Artificial Sequence
  Synthetic
ccccacagccgcaucaucuu

SEQ ID NO: 11138 - RNA, 20 nt, Artificial Sequence
  Synthetic
cccccacagccgcaucaucu

SEQ ID NO: 11139 - RNA, 20 nt, Artificial Sequence
  Synthetic
ccgcccccacagccgcauca

SEQ ID NO: 11140 - RNA, 20 nt, Artificial Sequence
  Synthetic
cgcccccacagccgcaucau

SEQ ID NO: 11141 - RNA, 20 nt, Artificial Sequence
  Synthetic
cggcugugggggcggcuggu

SEQ ID NO: 11142 - RNA, 20 nt, Artificial Sequence
  Synthetic
cugugggggcggcuggugcu

SEQ ID NO: 11143 - RNA, 20 nt, Artificial Sequence
  Synthetic
gaaaagaugaugcggcugug

SEQ ID NO: 11144 - RNA, 20 nt, Artificial Sequence
  Synthetic
gaugaugcggcugugggggc

SEQ ID NO: 11145 - RNA, 20 nt, Artificial Sequence
  Synthetic
gaugcggcugugggggcggc

SEQ ID NO: 11146 - RNA, 20 nt, Artificial Sequence
  Synthetic
gcaccagccgcccccacagc

SEQ ID NO: 11147 - RNA, 20 nt, Artificial Sequence
  Synthetic
gcccccacagccgcaucauc

SEQ ID NO: 11148 - RNA, 20 nt, Artificial Sequence
  Synthetic
gccgcccccacagccgcauc

SEQ ID NO: 11149 - RNA, 20 nt, Artificial Sequence
  Synthetic
gcggcugugggggcggcugg

SEQ ID NO: 11150 - RNA, 20 nt, Artificial Sequence
  Synthetic
gcugugggggcggcuggugc

SEQ ID NO: 11151 - RNA, 20 nt, Artificial Sequence
  Synthetic
ggcugugggggcggcuggug

SEQ ID NO: 11152 - RNA, 20 nt, Artificial Sequence
  Synthetic
gugggggcggcuggugcuga

SEQ ID NO: 11153 - RNA, 20 nt, Artificial Sequence
  Synthetic
ucagcaccagccgcccccac

SEQ ID NO: 11154 - RNA, 20 nt, Artificial Sequence
  Synthetic
ugaugcggcugugggggcgg

SEQ ID NO: 11155 - RNA, 20 nt, Artificial Sequence
  Synthetic
ugcggcugugggggcggcug

SEQ ID NO: 11156 - RNA, 20 nt, Artificial Sequence
  Synthetic
ugugggggcggcuggugcug

SEQ ID NO: 11157 - RNA, 20 nt, Artificial Sequence
  Synthetic
uucagcaccagccgccccca

SEQ ID NO: 11158 - RNA, 21 nt, Artificial Sequence
  Synthetic
aaaagaugaugcggcuguggg

SEQ ID NO: 11159 - RNA, 21 nt, Artificial Sequence
  Synthetic
aaagaugaugcggcugugggg

SEQ ID NO: 11160 - RNA, 21 nt, Artificial Sequence
  Synthetic
aagaaaagaugaugcggcugu

SEQ ID NO: 11161 - RNA, 21 nt, Artificial Sequence
  Synthetic
aagaugaugcggcuguggggg

SEQ ID NO: 11162 - RNA, 21 nt, Artificial Sequence
  Synthetic
accagccgcccccacagccgc

SEQ ID NO: 11163 - RNA, 21 nt, Artificial Sequence
  Synthetic
agaaaagaugaugcggcugug

SEQ ID NO: 11164 - RNA, 21 nt, Artificial Sequence
  Synthetic
agaugaugcggcugugggggc

SEQ ID NO: 11165 - RNA, 21 nt, Artificial Sequence
  Synthetic
agcaccagccgcccccacagc

SEQ ID NO: 11166 - RNA, 21 nt, Artificial Sequence
  Synthetic
agccgcccccacagccgcauc

SEQ ID NO: 11167 - RNA, 21 nt, Artificial Sequence
  Synthetic
augaugcggcugugggggcgg

SEQ ID NO: 11168 - RNA, 21 nt, Artificial Sequence
  Synthetic
augcggcugugggggcggcug

SEQ ID NO: 11169 - RNA, 21 nt, Artificial Sequence
  Synthetic
cacagccgcaucaucuuuucu

SEQ ID NO: 11170 - RNA, 21 nt, Artificial Sequence
  Synthetic
caccagccgcccccacagccg

SEQ ID NO: 11171 - RNA, 21 nt, Artificial Sequence
  Synthetic
cagcaccagccgcccccacag

SEQ ID NO: 11172 - RNA, 21 nt, Artificial Sequence
  Synthetic
cagccgcccccacagccgcau

SEQ ID NO: 11173 - RNA, 21 nt, Artificial Sequence
  Synthetic
ccacagccgcaucaucuuuuc

SEQ ID NO: 11174 - RNA, 21 nt, Artificial Sequence
  Synthetic
ccagccgcccccacagccgca

SEQ ID NO: 11175 - RNA, 21 nt, Artificial Sequence
  Synthetic
cccacagccgcaucaucuuuu

SEQ ID NO: 11176 - RNA, 21 nt, Artificial Sequence
  Synthetic
ccccacagccgcaucaucuuu

SEQ ID NO: 11177 - RNA, 21 nt, Artificial Sequence
  Synthetic
cccccacagccgcaucaucuu

SEQ ID NO: 11178 - RNA, 21 nt, Artificial Sequence
  Synthetic
ccgcccccacagccgcaucau

SEQ ID NO: 11179 - RNA, 21 nt, Artificial Sequence
  Synthetic
cgcccccacagccgcaucauc

SEQ ID NO: 11180 - RNA, 21 nt, Artificial Sequence
  Synthetic
cggcugugggggcggcuggug

SEQ ID NO: 11181 - RNA, 21 nt, Artificial Sequence
  Synthetic
cugugggggcggcuggugcug

SEQ ID NO: 11182 - RNA, 21 nt, Artificial Sequence
  Synthetic
gaaaagaugaugcggcugugg

SEQ ID NO: 11183 - RNA, 21 nt, Artificial Sequence
  Synthetic
gaugaugcggcugugggggcg

SEQ ID NO: 11184 - RNA, 21 nt, Artificial Sequence
  Synthetic
gaugcggcugugggggcggcu

SEQ ID NO: 11185 - RNA, 21 nt, Artificial Sequence
  Synthetic
gcaccagccgcccccacagcc

SEQ ID NO: 11186 - RNA, 21 nt, Artificial Sequence
  Synthetic
gcccccacagccgcaucaucu

SEQ ID NO: 11187 - RNA, 21 nt, Artificial Sequence
  Synthetic
gccgcccccacagccgcauca

SEQ ID NO: 11188 - RNA, 21 nt, Artificial Sequence
  Synthetic
gcggcugugggggcggcuggu

SEQ ID NO: 11189 - RNA, 21 nt, Artificial Sequence
  Synthetic
gcugugggggcggcuggugcu

SEQ ID NO: 11190 - RNA, 21 nt, Artificial Sequence
  Synthetic
ggcugugggggcggcuggugc

SEQ ID NO: 11191 - RNA, 21 nt, Artificial Sequence
  Synthetic
gugggggcggcuggugcugaa

SEQ ID NO: 11192 - RNA, 21 nt, Artificial Sequence
  Synthetic
guucagcaccagccgccccca

SEQ ID NO: 11193 - RNA, 21 nt, Artificial Sequence
  Synthetic
ucagcaccagccgcccccaca

SEQ ID NO: 11194 - RNA, 21 nt, Artificial Sequence
  Synthetic
ugaugcggcugugggggcggc

SEQ ID NO: 11195 - RNA, 21 nt, Artificial Sequence
  Synthetic
ugcggcugugggggcggcugg

SEQ ID NO: 11196 - RNA, 21 nt, Artificial Sequence
  Synthetic
ugugggggcggcuggugcuga

SEQ ID NO: 11197 - RNA, 21 nt, Artificial Sequence
  Synthetic
uucagcaccagccgcccccac

SEQ ID NO: 11198 - RNA, 22 nt, Artificial Sequence
  Synthetic
aaaagaugaugcggcugugggg

SEQ ID NO: 11199 - RNA, 22 nt, Artificial Sequence
  Synthetic
aaagaaaagaugaugcggcugu

SEQ ID NO: 11200 - RNA, 22 nt, Artificial Sequence
  Synthetic
aaagaugaugcggcuguggggg

SEQ ID NO: 11201 - RNA, 22 nt, Artificial Sequence
  Synthetic
aagaaaagaugaugcggcugug

SEQ ID NO: 11202 - RNA, 22 nt, Artificial Sequence
  Synthetic
aagaugaugcggcugugggggc

SEQ ID NO: 11203 - RNA, 22 nt, Artificial Sequence
  Synthetic
accagccgcccccacagccgca

SEQ ID NO: 11204 - RNA, 22 nt, Artificial Sequence
  Synthetic
agaaaagaugaugcggcugugg

SEQ ID NO: 11205 - RNA, 22 nt, Artificial Sequence
  Synthetic
agaugaugcggcugugggggcg

SEQ ID NO: 11206 - RNA, 22 nt, Artificial Sequence
  Synthetic
agcaccagccgcccccacagcc

SEQ ID NO: 11207 - RNA, 22 nt, Artificial Sequence
  Synthetic
agccgcccccacagccgcauca

SEQ ID NO: 11208 - RNA, 22 nt, Artificial Sequence
  Synthetic
augaugcggcugugggggcggc

SEQ ID NO: 11209 - RNA, 22 nt, Artificial Sequence
  Synthetic
augcggcugugggggcggcugg

SEQ ID NO: 11210 - RNA, 22 nt, Artificial Sequence
  Synthetic
cacagccgcaucaucuuuucuu

SEQ ID NO: 11211 - RNA, 22 nt, Artificial Sequence
  Synthetic
caccagccgcccccacagccgc

SEQ ID NO: 11212 - RNA, 22 nt, Artificial Sequence
  Synthetic
cagcaccagccgcccccacagc

SEQ ID NO: 11213 - RNA, 22 nt, Artificial Sequence
  Synthetic
cagccgcccccacagccgcauc

SEQ ID NO: 11214 - RNA, 22 nt, Artificial Sequence
  Synthetic
ccacagccgcaucaucuuuucu

SEQ ID NO: 11215 - RNA, 22 nt, Artificial Sequence
  Synthetic
ccagccgcccccacagccgcau

SEQ ID NO: 11216 - RNA, 22 nt, Artificial Sequence
  Synthetic
cccacagccgcaucaucuuuuc

SEQ ID NO: 11217 - RNA, 22 nt, Artificial Sequence
  Synthetic
ccccacagccgcaucaucuuuu

SEQ ID NO: 11218 - RNA, 22 nt, Artificial Sequence
  Synthetic
cccccacagccgcaucaucuuu

SEQ ID NO: 11219 - RNA, 22 nt, Artificial Sequence
  Synthetic
ccgcccccacagccgcaucauc

SEQ ID NO: 11220 - RNA, 22 nt, Artificial Sequence
  Synthetic
cgcccccacagccgcaucaucu

SEQ ID NO: 11221 - RNA, 22 nt, Artificial Sequence
  Synthetic
cggcugugggggcggcuggugc

SEQ ID NO: 11222 - RNA, 22 nt, Artificial Sequence
  Synthetic
cugugggggcggcuggugcuga

SEQ ID NO: 11223 - RNA, 22 nt, Artificial Sequence
  Synthetic
gaaaagaugaugcggcuguggg

SEQ ID NO: 11224 - RNA, 22 nt, Artificial Sequence
  Synthetic
gaugaugcggcugugggggcgg

SEQ ID NO: 11225 - RNA, 22 nt, Artificial Sequence
  Synthetic
gaugcggcugugggggcggcug

SEQ ID NO: 11226 - RNA, 22 nt, Artificial Sequence
  Synthetic
gcaccagccgcccccacagccg

SEQ ID NO: 11227 - RNA, 22 nt, Artificial Sequence
  Synthetic
gcccccacagccgcaucaucuu

SEQ ID NO: 11228 - RNA, 22 nt, Artificial Sequence
  Synthetic
gccgcccccacagccgcaucau

SEQ ID NO: 11229 - RNA, 22 nt, Artificial Sequence
  Synthetic
gcggcugugggggcggcuggug

SEQ ID NO: 11230 - RNA, 22 nt, Artificial Sequence
  Synthetic
gcugugggggcggcuggugcug

SEQ ID NO: 11231 - RNA, 22 nt, Artificial Sequence
  Synthetic
ggcugugggggcggcuggugcu

SEQ ID NO: 11232 - RNA, 22 nt, Artificial Sequence
  Synthetic
gugggggcggcuggugcugaac

SEQ ID NO: 11233 - RNA, 22 nt, Artificial Sequence
  Synthetic
guucagcaccagccgcccccac

SEQ ID NO: 11234 - RNA, 22 nt, Artificial Sequence
  Synthetic
ucagcaccagccgcccccacag

SEQ ID NO: 11235 - RNA, 22 nt, Artificial Sequence
  Synthetic
ugaugcggcugugggggcggcu

SEQ ID NO: 11236 - RNA, 22 nt, Artificial Sequence
  Synthetic
ugcggcugugggggcggcuggu

SEQ ID NO: 11237 - RNA, 22 nt, Artificial Sequence
  Synthetic
ugugggggcggcuggugcugaa

SEQ ID NO: 11238 - RNA, 22 nt, Artificial Sequence
  Synthetic
uguucagcaccagccgccccca

SEQ ID NO: 11239 - RNA, 22 nt, Artificial Sequence
  Synthetic
uucagcaccagccgcccccaca

SEQ ID NO: 11240 - RNA, 20 nt, Artificial Sequence
  Synthetic
aaaagaugaugcggcugagg

SEQ ID NO: 11241 - RNA, 20 nt, Artificial Sequence
  Synthetic
aaagaugaugcggcugaggg

SEQ ID NO: 11242 - RNA, 20 nt, Artificial Sequence
  Synthetic
aagaugaugcggcugagggg

SEQ ID NO: 11243 - RNA, 20 nt, Artificial Sequence
  Synthetic
accagccgcccccucagccg

SEQ ID NO: 11244 - RNA, 20 nt, Artificial Sequence
  Synthetic
agaaaagaugaugcggcuga

SEQ ID NO: 11245 - RNA, 20 nt, Artificial Sequence
  Synthetic
agaugaugcggcugaggggg

SEQ ID NO: 11246 - RNA, 20 nt, Artificial Sequence
  Synthetic
agcaccagccgcccccucag

SEQ ID NO: 11247 - RNA, 20 nt, Artificial Sequence
  Synthetic
agccgcccccucagccgcau

SEQ ID NO: 11248 - RNA, 20 nt, Artificial Sequence
  Synthetic
augaugcggcugagggggcg

SEQ ID NO: 11249 - RNA, 20 nt, Artificial Sequence
  Synthetic
augcggcugagggggcggcu

SEQ ID NO: 11250 - RNA, 20 nt, Artificial Sequence
  Synthetic
caccagccgcccccucagcc

SEQ ID NO: 11251 - RNA, 20 nt, Artificial Sequence
  Synthetic
cagcaccagccgcccccuca

SEQ ID NO: 11252 - RNA, 20 nt, Artificial Sequence
  Synthetic
cagccgcccccucagccgca

SEQ ID NO: 11253 - RNA, 20 nt, Artificial Sequence
  Synthetic
ccagccgcccccucagccgc

SEQ ID NO: 11254 - RNA, 20 nt, Artificial Sequence
  Synthetic
cccccucagccgcaucaucu

SEQ ID NO: 11255 - RNA, 20 nt, Artificial Sequence
  Synthetic
ccccucagccgcaucaucuu

SEQ ID NO: 11256 - RNA, 20 nt, Artificial Sequence
  Synthetic
cccucagccgcaucaucuuu

SEQ ID NO: 11257 - RNA, 20 nt, Artificial Sequence
  Synthetic
ccgcccccucagccgcauca

SEQ ID NO: 11258 - RNA, 20 nt, Artificial Sequence
  Synthetic
ccucagccgcaucaucuuuu

SEQ ID NO: 11259 - RNA, 20 nt, Artificial Sequence
  Synthetic
cgcccccucagccgcaucau

SEQ ID NO: 11260 - RNA, 20 nt, Artificial Sequence
  Synthetic
cggcugagggggcggcuggu

SEQ ID NO: 11261 - RNA, 20 nt, Artificial Sequence
  Synthetic
cucagccgcaucaucuuuuc

SEQ ID NO: 11262 - RNA, 20 nt, Artificial Sequence
  Synthetic
cugagggggcggcuggugcu

SEQ ID NO: 11263 - RNA, 20 nt, Artificial Sequence
  Synthetic
gaaaagaugaugcggcugag

SEQ ID NO: 11264 - RNA, 20 nt, Artificial Sequence
  Synthetic
gagggggcggcuggugcuga

SEQ ID NO: 11265 - RNA, 20 nt, Artificial Sequence
  Synthetic
gaugaugcggcugagggggc

SEQ ID NO: 11266 - RNA, 20 nt, Artificial Sequence
  Synthetic
gaugcggcugagggggcggc

SEQ ID NO: 11267 - RNA, 20 nt, Artificial Sequence
  Synthetic
gcaccagccgcccccucagc

SEQ ID NO: 11268 - RNA, 20 nt, Artificial Sequence
  Synthetic
gcccccucagccgcaucauc

SEQ ID NO: 11269 - RNA, 20 nt, Artificial Sequence
  Synthetic
gccgcccccucagccgcauc

SEQ ID NO: 11270 - RNA, 20 nt, Artificial Sequence
  Synthetic
gcggcugagggggcggcugg

SEQ ID NO: 11271 - RNA, 20 nt, Artificial Sequence
  Synthetic
gcugagggggcggcuggugc

SEQ ID NO: 11272 - RNA, 20 nt, Artificial Sequence
  Synthetic
ggcugagggggcggcuggug

SEQ ID NO: 11273 - RNA, 20 nt, Artificial Sequence
  Synthetic
ucagcaccagccgcccccuc

SEQ ID NO: 11274 - RNA, 20 nt, Artificial Sequence
  Synthetic
ugagggggcggcuggugcug

SEQ ID NO: 11275 - RNA, 20 nt, Artificial Sequence
  Synthetic
ugaugcggcugagggggcgg

SEQ ID NO: 11276 - RNA, 20 nt, Artificial Sequence
  Synthetic
ugcggcugagggggcggcug

SEQ ID NO: 11277 - RNA, 20 nt, Artificial Sequence
  Synthetic
uucagcaccagccgcccccu

SEQ ID NO: 11278 - RNA, 21 nt, Artificial Sequence
  Synthetic
aaaagaugaugcggcugaggg

SEQ ID NO: 11279 - RNA, 21 nt, Artificial Sequence
  Synthetic
aaagaugaugcggcugagggg

SEQ ID NO: 11280 - RNA, 21 nt, Artificial Sequence
  Synthetic
aagaaaagaugaugcggcuga

SEQ ID NO: 11281 - RNA, 21 nt, Artificial Sequence
  Synthetic
aagaugaugcggcugaggggg

SEQ ID NO: 11282 - RNA, 21 nt, Artificial Sequence
  Synthetic
accagccgcccccucagccgc

SEQ ID NO: 11283 - RNA, 21 nt, Artificial Sequence
  Synthetic
agaaaagaugaugcggcugag

SEQ ID NO: 11284 - RNA, 21 nt, Artificial Sequence
  Synthetic
agaugaugcggcugagggggc

SEQ ID NO: 11285 - RNA, 21 nt, Artificial Sequence
  Synthetic
agcaccagccgcccccucagc

SEQ ID NO: 11286 - RNA, 21 nt, Artificial Sequence
  Synthetic
agccgcccccucagccgcauc

SEQ ID NO: 11287 - RNA, 21 nt, Artificial Sequence
  Synthetic
augaugcggcugagggggcgg

SEQ ID NO: 11288 - RNA, 21 nt, Artificial Sequence
  Synthetic
augcggcugagggggcggcug

SEQ ID NO: 11289 - RNA, 21 nt, Artificial Sequence
  Synthetic
caccagccgcccccucagccg

SEQ ID NO: 11290 - RNA, 21 nt, Artificial Sequence
  Synthetic
cagcaccagccgcccccucag

SEQ ID NO: 11291 - RNA, 21 nt, Artificial Sequence
  Synthetic
cagccgcccccucagccgcau

SEQ ID NO: 11292 - RNA, 21 nt, Artificial Sequence
  Synthetic
ccagccgcccccucagccgca

SEQ ID NO: 11293 - RNA, 21 nt, Artificial Sequence
  Synthetic
cccccucagccgcaucaucuu

SEQ ID NO: 11294 - RNA, 21 nt, Artificial Sequence
  Synthetic
ccccucagccgcaucaucuuu

SEQ ID NO: 11295 - RNA, 21 nt, Artificial Sequence
  Synthetic
cccucagccgcaucaucuuuu

SEQ ID NO: 11296 - RNA, 21 nt, Artificial Sequence
  Synthetic
ccgcccccucagccgcaucau

SEQ ID NO: 11297 - RNA, 21 nt, Artificial Sequence
  Synthetic
ccucagccgcaucaucuuuuc

SEQ ID NO: 11298 - RNA, 21 nt, Artificial Sequence
  Synthetic
cgcccccucagccgcaucauc

SEQ ID NO: 11299 - RNA, 21 nt, Artificial Sequence
  Synthetic
cggcugagggggcggcuggug

SEQ ID NO: 11300 - RNA, 21 nt, Artificial Sequence
  Synthetic
cucagccgcaucaucuuuucu

SEQ ID NO: 11301 - RNA, 21 nt, Artificial Sequence
  Synthetic
cugagggggcggcuggugcug

SEQ ID NO: 11302 - RNA, 21 nt, Artificial Sequence
  Synthetic
gaaaagaugaugcggcugagg

SEQ ID NO: 11303 - RNA, 21 nt, Artificial Sequence
  Synthetic
gagggggcggcuggugcugaa

SEQ ID NO: 11304 - RNA, 21 nt, Artificial Sequence
  Synthetic
gaugaugcggcugagggggcg

SEQ ID NO: 11305 - RNA, 21 nt, Artificial Sequence
  Synthetic
gaugcggcugagggggcggcu

SEQ ID NO: 11306 - RNA, 21 nt, Artificial Sequence
  Synthetic
gcaccagccgcccccucagcc

SEQ ID NO: 11307 - RNA, 21 nt, Artificial Sequence
  Synthetic
gcccccucagccgcaucaucu

SEQ ID NO: 11308 - RNA, 21 nt, Artificial Sequence
  Synthetic
gccgcccccucagccgcauca

SEQ ID NO: 11309 - RNA, 21 nt, Artificial Sequence
  Synthetic
gcggcugagggggcggcuggu

SEQ ID NO: 11310 - RNA, 21 nt, Artificial Sequence
  Synthetic
gcugagggggcggcuggugcu

SEQ ID NO: 11311 - RNA, 21 nt, Artificial Sequence
  Synthetic
ggcugagggggcggcuggugc

SEQ ID NO: 11312 - RNA, 21 nt, Artificial Sequence
  Synthetic
guucagcaccagccgcccccu

SEQ ID NO: 11313 - RNA, 21 nt, Artificial Sequence
  Synthetic
ucagcaccagccgcccccuca

SEQ ID NO: 11314 - RNA, 21 nt, Artificial Sequence
  Synthetic
ugagggggcggcuggugcuga

SEQ ID NO: 11315 - RNA, 21 nt, Artificial Sequence
  Synthetic
ugaugcggcugagggggcggc

SEQ ID NO: 11316 - RNA, 21 nt, Artificial Sequence
  Synthetic
ugcggcugagggggcggcugg

SEQ ID NO: 11317 - RNA, 21 nt, Artificial Sequence
  Synthetic
uucagcaccagccgcccccuc

SEQ ID NO: 11318 - RNA, 22 nt, Artificial Sequence
  Synthetic
aaaagaugaugcggcugagggg

SEQ ID NO: 11319 - RNA, 22 nt, Artificial Sequence
  Synthetic
aaagaaaagaugaugcggcuga

SEQ ID NO: 11320 - RNA, 22 nt, Artificial Sequence
  Synthetic
aaagaugaugcggcugaggggg

SEQ ID NO: 11321 - RNA, 22 nt, Artificial Sequence
  Synthetic
aagaaaagaugaugcggcugag

SEQ ID NO: 11322 - RNA, 22 nt, Artificial Sequence
  Synthetic
aagaugaugcggcugagggggc

SEQ ID NO: 11323 - RNA, 22 nt, Artificial Sequence
  Synthetic
accagccgcccccucagccgca

SEQ ID NO: 11324 - RNA, 22 nt, Artificial Sequence
  Synthetic
agaaaagaugaugcggcugagg

SEQ ID NO: 11325 - RNA, 22 nt, Artificial Sequence
  Synthetic
agaugaugcggcugagggggcg

SEQ ID NO: 11326 - RNA, 22 nt, Artificial Sequence
  Synthetic
agcaccagccgcccccucagcc

SEQ ID NO: 11327 - RNA, 22 nt, Artificial Sequence
  Synthetic
agccgcccccucagccgcauca

SEQ ID NO: 11328 - RNA, 22 nt, Artificial Sequence
  Synthetic
augaugcggcugagggggcggc

SEQ ID NO: 11329 - RNA, 22 nt, Artificial Sequence
  Synthetic
augcggcugagggggcggcugg

SEQ ID NO: 11330 - RNA, 22 nt, Artificial Sequence
  Synthetic
caccagccgcccccucagccgc

SEQ ID NO: 11331 - RNA, 22 nt, Artificial Sequence
  Synthetic
cagcaccagccgcccccucagc

SEQ ID NO: 11332 - RNA, 22 nt, Artificial Sequence
  Synthetic
cagccgcccccucagccgcauc

SEQ ID NO: 11333 - RNA, 22 nt, Artificial Sequence
  Synthetic
ccagccgcccccucagccgcau

SEQ ID NO: 11334 - RNA, 22 nt, Artificial Sequence
  Synthetic
cccccucagccgcaucaucuuu

SEQ ID NO: 11335 - RNA, 22 nt, Artificial Sequence
  Synthetic
ccccucagccgcaucaucuuuu

SEQ ID NO: 11336 - RNA, 22 nt, Artificial Sequence
  Synthetic
cccucagccgcaucaucuuuuc

SEQ ID NO: 11337 - RNA, 22 nt, Artificial Sequence
  Synthetic
ccgcccccucagccgcaucauc

SEQ ID NO: 11338 - RNA, 22 nt, Artificial Sequence
  Synthetic
ccucagccgcaucaucuuuucu

SEQ ID NO: 11339 - RNA, 22 nt, Artificial Sequence
  Synthetic
cgcccccucagccgcaucaucu

SEQ ID NO: 11340 - RNA, 22 nt, Artificial Sequence
  Synthetic
cggcugagggggcggcuggugc

SEQ ID NO: 11341 - RNA, 22 nt, Artificial Sequence
  Synthetic
cucagccgcaucaucuuuucuu

SEQ ID NO: 11342 - RNA, 22 nt, Artificial Sequence
  Synthetic
cugagggggcggcuggugcuga

SEQ ID NO: 11343 - RNA, 22 nt, Artificial Sequence
  Synthetic
gaaaagaugaugcggcugaggg

SEQ ID NO: 11344 - RNA, 22 nt, Artificial Sequence
  Synthetic
gagggggcggcuggugcugaac

SEQ ID NO: 11345 - RNA, 22 nt, Artificial Sequence
  Synthetic
gaugaugcggcugagggggcgg

SEQ ID NO: 11346 - RNA, 22 nt, Artificial Sequence
  Synthetic
gaugcggcugagggggcggcug

SEQ ID NO: 11347 - RNA, 22 nt, Artificial Sequence
  Synthetic
gcaccagccgcccccucagccg

SEQ ID NO: 11348 - RNA, 22 nt, Artificial Sequence
  Synthetic
gcccccucagccgcaucaucuu

SEQ ID NO: 11349 - RNA, 22 nt, Artificial Sequence
  Synthetic
gccgcccccucagccgcaucau

SEQ ID NO: 11350 - RNA, 22 nt, Artificial Sequence
  Synthetic
gcggcugagggggcggcuggug

SEQ ID NO: 11351 - RNA, 22 nt, Artificial Sequence
  Synthetic
gcugagggggcggcuggugcug

SEQ ID NO: 11352 - RNA, 22 nt, Artificial Sequence
  Synthetic
ggcugagggggcggcuggugcu

SEQ ID NO: 11353 - RNA, 22 nt, Artificial Sequence
  Synthetic
guucagcaccagccgcccccuc

SEQ ID NO: 11354 - RNA, 22 nt, Artificial Sequence
  Synthetic
ucagcaccagccgcccccucag

SEQ ID NO: 11355 - RNA, 22 nt, Artificial Sequence
  Synthetic
ugagggggcggcuggugcugaa

SEQ ID NO: 11356 - RNA, 22 nt, Artificial Sequence
  Synthetic
ugaugcggcugagggggcggcu

SEQ ID NO: 11357 - RNA, 22 nt, Artificial Sequence
  Synthetic
ugcggcugagggggcggcuggu

SEQ ID NO: 11358 - RNA, 22 nt, Artificial Sequence
  Synthetic
uguucagcaccagccgcccccu

SEQ ID NO: 11359 - RNA, 22 nt, Artificial Sequence
  Synthetic
uucagcaccagccgcccccuca

SEQ ID NO: 11360 - RNA, 20 nt, Artificial Sequence
  Synthetic
aaaacagaugcgcccguguu

SEQ ID NO: 11361 - RNA, 20 nt, Artificial Sequence
  Synthetic
aaacacgggcgcaucuguuu

SEQ ID NO: 11362 - RNA, 20 nt, Artificial Sequence
  Synthetic
aacacgggcgcaucuguuuu

SEQ ID NO: 11363 - RNA, 20 nt, Artificial Sequence
  Synthetic
acacgggcgcaucuguuuug

SEQ ID NO: 11364 - RNA, 20 nt, Artificial Sequence
  Synthetic
acgggcgcaucuguuuugaa

SEQ ID NO: 11365 - RNA, 20 nt, Artificial Sequence
  Synthetic
agccgcaucaucuuuucuuu

SEQ ID NO: 11366 - RNA, 20 nt, Artificial Sequence
  Synthetic
aucaucuuuucuuucaaaac

SEQ ID NO: 11367 - RNA, 20 nt, Artificial Sequence
  Synthetic
aucuguuuugaaagaaaaga

SEQ ID NO: 11368 - RNA, 20 nt, Artificial Sequence
  Synthetic
aucuuuucuuucaaaacaga

SEQ ID NO: 11369 - RNA, 20 nt, Artificial Sequence
  Synthetic
augaaacacgggcgcaucug

SEQ ID NO: 11370 - RNA, 20 nt, Artificial Sequence
  Synthetic
caaaacagaugcgcccgugu

SEQ ID NO: 11371 - RNA, 20 nt, Artificial Sequence
  Synthetic
cacgggcgcaucuguuuuga

SEQ ID NO: 11372 - RNA, 20 nt, Artificial Sequence
  Synthetic
cagccgcaucaucuuuucuu

SEQ ID NO: 11373 - RNA, 20 nt, Artificial Sequence
  Synthetic
caucaucuuuucuuucaaaa

SEQ ID NO: 11374 - RNA, 20 nt, Artificial Sequence
  Synthetic
caucuguuuugaaagaaaag

SEQ ID NO: 11375 - RNA, 20 nt, Artificial Sequence
  Synthetic
caucuuuucuuucaaaacag

SEQ ID NO: 11376 - RNA, 20 nt, Artificial Sequence
  Synthetic
ccgcaucaucuuuucuuuca

SEQ ID NO: 11377 - RNA, 20 nt, Artificial Sequence
  Synthetic
cgcaucaucuuuucuuucaa

SEQ ID NO: 11378 - RNA, 20 nt, Artificial Sequence
  Synthetic
cgcaucuguuuugaaagaaa

SEQ ID NO: 11379 - RNA, 20 nt, Artificial Sequence
  Synthetic
cgggcgcaucuguuuugaaa

SEQ ID NO: 11380 - RNA, 20 nt, Artificial Sequence
  Synthetic
cuguuuugaaagaaaagaug

SEQ ID NO: 11381 - RNA, 20 nt, Artificial Sequence
  Synthetic
cuuucaaaacagaugcgccc

SEQ ID NO: 11382 - RNA, 20 nt, Artificial Sequence
  Synthetic
cuuuucuuucaaaacagaug

SEQ ID NO: 11383 - RNA, 20 nt, Artificial Sequence
  Synthetic
gaaacacgggcgcaucuguu

SEQ ID NO: 11384 - RNA, 20 nt, Artificial Sequence
  Synthetic
gaugaaacacgggcgcaucu

SEQ ID NO: 11385 - RNA, 20 nt, Artificial Sequence
  Synthetic
gcaucaucuuuucuuucaaa

SEQ ID NO: 11386 - RNA, 20 nt, Artificial Sequence
  Synthetic
gcaucuguuuugaaagaaaa

SEQ ID NO: 11387 - RNA, 20 nt, Artificial Sequence
  Synthetic
gccgcaucaucuuuucuuuc

SEQ ID NO: 11388 - RNA, 20 nt, Artificial Sequence
  Synthetic
gcgcaucuguuuugaaagaa

SEQ ID NO: 11389 - RNA, 20 nt, Artificial Sequence
  Synthetic
ggcgcaucuguuuugaaaga

SEQ ID NO: 11390 - RNA, 20 nt, Artificial Sequence
  Synthetic
gggcgcaucuguuuugaaag

SEQ ID NO: 11391 - RNA, 20 nt, Artificial Sequence
  Synthetic
guuuugaaagaaaagaugau

SEQ ID NO: 11392 - RNA, 20 nt, Artificial Sequence
  Synthetic
ucaaaacagaugcgcccgug

SEQ ID NO: 11393 - RNA, 20 nt, Artificial Sequence
  Synthetic
ucaucuuuucuuucaaaaca

SEQ ID NO: 11394 - RNA, 20 nt, Artificial Sequence
  Synthetic
ucuguuuugaaagaaaagau

SEQ ID NO: 11395 - RNA, 20 nt, Artificial Sequence
  Synthetic
ucuuucaaaacagaugcgcc

SEQ ID NO: 11396 - RNA, 20 nt, Artificial Sequence
  Synthetic
ucuuuucuuucaaaacagau

SEQ ID NO: 11397 - RNA, 20 nt, Artificial Sequence
  Synthetic
ugaaacacgggcgcaucugu

SEQ ID NO: 11398 - RNA, 20 nt, Artificial Sequence
  Synthetic
uguuuugaaagaaaagauga

SEQ ID NO: 11399 - RNA, 20 nt, Artificial Sequence
  Synthetic
uucaaaacagaugcgcccgu

SEQ ID NO: 11400 - RNA, 20 nt, Artificial Sequence
  Synthetic
uucuuucaaaacagaugcgc

SEQ ID NO: 11401 - RNA, 20 nt, Artificial Sequence
  Synthetic
uuucaaaacagaugcgcccg

SEQ ID NO: 11402 - RNA, 20 nt, Artificial Sequence
  Synthetic
uuucuuucaaaacagaugcg

SEQ ID NO: 11403 - RNA, 20 nt, Artificial Sequence
  Synthetic
uuugaaagaaaagaugaugc

SEQ ID NO: 11404 - RNA, 20 nt, Artificial Sequence
  Synthetic
uuuucuuucaaaacagaugc

SEQ ID NO: 11405 - RNA, 20 nt, Artificial Sequence
  Synthetic
uuuugaaagaaaagaugaug

SEQ ID NO: 11406 - RNA, 21 nt, Artificial Sequence
  Synthetic
aaaacagaugcgcccguguuu

SEQ ID NO: 11407 - RNA, 21 nt, Artificial Sequence
  Synthetic
aaacacgggcgcaucuguuuu

SEQ ID NO: 11408 - RNA, 21 nt, Artificial Sequence
  Synthetic
aacacgggcgcaucuguuuug

SEQ ID NO: 11409 - RNA, 21 nt, Artificial Sequence
  Synthetic
acacgggcgcaucuguuuuga

SEQ ID NO: 11410 - RNA, 21 nt, Artificial Sequence
  Synthetic
acgggcgcaucuguuuugaaa

SEQ ID NO: 11411 - RNA, 21 nt, Artificial Sequence
  Synthetic
agaugaaacacgggcgcaucu

SEQ ID NO: 11412 - RNA, 21 nt, Artificial Sequence
  Synthetic
agccgcaucaucuuuucuuuc

SEQ ID NO: 11413 - RNA, 21 nt, Artificial Sequence
  Synthetic
aucaucuuuucuuucaaaaca

SEQ ID NO: 11414 - RNA, 21 nt, Artificial Sequence
  Synthetic
aucuguuuugaaagaaaagau

SEQ ID NO: 11415 - RNA, 21 nt, Artificial Sequence
  Synthetic
aucuuuucuuucaaaacagau

SEQ ID NO: 11416 - RNA, 21 nt, Artificial Sequence
  Synthetic
augaaacacgggcgcaucugu

SEQ ID NO: 11417 - RNA, 21 nt, Artificial Sequence
  Synthetic
caaaacagaugcgcccguguu

SEQ ID NO: 11418 - RNA, 21 nt, Artificial Sequence
  Synthetic
cacgggcgcaucuguuuugaa

SEQ ID NO: 11419 - RNA, 21 nt, Artificial Sequence
  Synthetic
cagccgcaucaucuuuucuuu

SEQ ID NO: 11420 - RNA, 21 nt, Artificial Sequence
  Synthetic
caucaucuuuucuuucaaaac

SEQ ID NO: 11421 - RNA, 21 nt, Artificial Sequence
  Synthetic
caucuguuuugaaagaaaaga

SEQ ID NO: 11422 - RNA, 21 nt, Artificial Sequence
  Synthetic
caucuuuucuuucaaaacaga

SEQ ID NO: 11423 - RNA, 21 nt, Artificial Sequence
  Synthetic
ccagccgcaucaucuuuucuu

SEQ ID NO: 11424 - RNA, 21 nt, Artificial Sequence
  Synthetic
ccgcaucaucuuuucuuucaa

SEQ ID NO: 11425 - RNA, 21 nt, Artificial Sequence
  Synthetic
cgcaucaucuuuucuuucaaa

SEQ ID NO: 11426 - RNA, 21 nt, Artificial Sequence
  Synthetic
cgcaucuguuuugaaagaaaa

SEQ ID NO: 11427 - RNA, 21 nt, Artificial Sequence
  Synthetic
cgggcgcaucuguuuugaaag

SEQ ID NO: 11428 - RNA, 21 nt, Artificial Sequence
  Synthetic
cuguuuugaaagaaaagauga

SEQ ID NO: 11429 - RNA, 21 nt, Artificial Sequence
  Synthetic
cuuucaaaacagaugcgcccg

SEQ ID NO: 11430 - RNA, 21 nt, Artificial Sequence
  Synthetic
cuuuucuuucaaaacagaugc

SEQ ID NO: 11431 - RNA, 21 nt, Artificial Sequence
  Synthetic
gaaacacgggcgcaucuguuu

SEQ ID NO: 11432 - RNA, 21 nt, Artificial Sequence
  Synthetic
gaugaaacacgggcgcaucug

SEQ ID NO: 11433 - RNA, 21 nt, Artificial Sequence
  Synthetic
gcaucaucuuuucuuucaaaa

SEQ ID NO: 11434 - RNA, 21 nt, Artificial Sequence
  Synthetic
gcaucuguuuugaaagaaaag

SEQ ID NO: 11435 - RNA, 21 nt, Artificial Sequence
  Synthetic
gccgcaucaucuuuucuuuca

SEQ ID NO: 11436 - RNA, 21 nt, Artificial Sequence
  Synthetic
gcgcaucuguuuugaaagaaa

SEQ ID NO: 11437 - RNA, 21 nt, Artificial Sequence
  Synthetic
ggcgcaucuguuuugaaagaa

SEQ ID NO: 11438 - RNA, 21 nt, Artificial Sequence
  Synthetic
gggcgcaucuguuuugaaaga

SEQ ID NO: 11439 - RNA, 21 nt, Artificial Sequence
  Synthetic
guuuugaaagaaaagaugaug

SEQ ID NO: 11440 - RNA, 21 nt, Artificial Sequence
  Synthetic
ucaaaacagaugcgcccgugu

SEQ ID NO: 11441 - RNA, 21 nt, Artificial Sequence
  Synthetic
ucaucuuuucuuucaaaacag

SEQ ID NO: 11442 - RNA, 21 nt, Artificial Sequence
  Synthetic
ucuguuuugaaagaaaagaug

SEQ ID NO: 11443 - RNA, 21 nt, Artificial Sequence
  Synthetic
ucuuucaaaacagaugcgccc

SEQ ID NO: 11444 - RNA, 21 nt, Artificial Sequence
  Synthetic
ucuuuucuuucaaaacagaug

SEQ ID NO: 11445 - RNA, 21 nt, Artificial Sequence
  Synthetic
ugaaacacgggcgcaucuguu

SEQ ID NO: 11446 - RNA, 21 nt, Artificial Sequence
  Synthetic
uguuuugaaagaaaagaugau

SEQ ID NO: 11447 - RNA, 21 nt, Artificial Sequence
  Synthetic
uucaaaacagaugcgcccgug

SEQ ID NO: 11448 - RNA, 21 nt, Artificial Sequence
  Synthetic
uucuuucaaaacagaugcgcc

SEQ ID NO: 11449 - RNA, 21 nt, Artificial Sequence
  Synthetic
uuucaaaacagaugcgcccgu

SEQ ID NO: 11450 - RNA, 21 nt, Artificial Sequence
  Synthetic
uuucuuucaaaacagaugcgc

SEQ ID NO: 11451 - RNA, 21 nt, Artificial Sequence
  Synthetic
uuugaaagaaaagaugaugcg

SEQ ID NO: 11452 - RNA, 21 nt, Artificial Sequence
  Synthetic
uuuucuuucaaaacagaugcg

SEQ ID NO: 11453 - RNA, 21 nt, Artificial Sequence
  Synthetic
uuuugaaagaaaagaugaugc

SEQ ID NO: 11454 - RNA, 22 nt, Artificial Sequence
  Synthetic
aaaacagaugcgcccguguuuc

SEQ ID NO: 11455 - RNA, 22 nt, Artificial Sequence
  Synthetic
aaacacgggcgcaucuguuuug

SEQ ID NO: 11456 - RNA, 22 nt, Artificial Sequence
  Synthetic
aacacgggcgcaucuguuuuga

SEQ ID NO: 11457 - RNA, 22 nt, Artificial Sequence
  Synthetic
acacgggcgcaucuguuuugaa

SEQ ID NO: 11458 - RNA, 22 nt, Artificial Sequence
  Synthetic
acgggcgcaucuguuuugaaag

SEQ ID NO: 11459 - RNA, 22 nt, Artificial Sequence
  Synthetic
agaugaaacacgggcgcaucug

SEQ ID NO: 11460 - RNA, 22 nt, Artificial Sequence
  Synthetic
agccgcaucaucuuuucuuuca

SEQ ID NO: 11461 - RNA, 22 nt, Artificial Sequence
  Synthetic
aucaucuuuucuuucaaaacag

SEQ ID NO: 11462 - RNA, 22 nt, Artificial Sequence
  Synthetic
aucuguuuugaaagaaaagaug

SEQ ID NO: 11463 - RNA, 22 nt, Artificial Sequence
  Synthetic
aucuuuucuuucaaaacagaug

SEQ ID NO: 11464 - RNA, 22 nt, Artificial Sequence
  Synthetic
augaaacacgggcgcaucuguu

SEQ ID NO: 11465 - RNA, 22 nt, Artificial Sequence
  Synthetic
caaaacagaugcgcccguguuu

SEQ ID NO: 11466 - RNA, 22 nt, Artificial Sequence
  Synthetic
cacgggcgcaucuguuuugaaa

SEQ ID NO: 11467 - RNA, 22 nt, Artificial Sequence
  Synthetic
cagccgcaucaucuuuucuuuc

SEQ ID NO: 11468 - RNA, 22 nt, Artificial Sequence
  Synthetic
caucaucuuuucuuucaaaaca

SEQ ID NO: 11469 - RNA, 22 nt, Artificial Sequence
  Synthetic
caucuguuuugaaagaaaagau

SEQ ID NO: 11470 - RNA, 22 nt, Artificial Sequence
  Synthetic
caucuuuucuuucaaaacagau

SEQ ID NO: 11471 - RNA, 22 nt, Artificial Sequence
  Synthetic
ccagccgcaucaucuuuucuuu

SEQ ID NO: 11472 - RNA, 22 nt, Artificial Sequence
  Synthetic
cccagccgcaucaucuuuucuu

SEQ ID NO: 11473 - RNA, 22 nt, Artificial Sequence
  Synthetic
ccgcaucaucuuuucuuucaaa

SEQ ID NO: 11474 - RNA, 22 nt, Artificial Sequence
  Synthetic
cgcaucaucuuuucuuucaaaa

SEQ ID NO: 11475 - RNA, 22 nt, Artificial Sequence
  Synthetic
cgcaucuguuuugaaagaaaag

SEQ ID NO: 11476 - RNA, 22 nt, Artificial Sequence
  Synthetic
cgggcgcaucuguuuugaaaga

SEQ ID NO: 11477 - RNA, 22 nt, Artificial Sequence
  Synthetic
cuguuuugaaagaaaagaugau

SEQ ID NO: 11478 - RNA, 22 nt, Artificial Sequence
  Synthetic
cuuucaaaacagaugcgcccgu

SEQ ID NO: 11479 - RNA, 22 nt, Artificial Sequence
  Synthetic
cuuuucuuucaaaacagaugcg

SEQ ID NO: 11480 - RNA, 22 nt, Artificial Sequence
  Synthetic
gaaacacgggcgcaucuguuuu

SEQ ID NO: 11481 - RNA, 22 nt, Artificial Sequence
  Synthetic
gaugaaacacgggcgcaucugu

SEQ ID NO: 11482 - RNA, 22 nt, Artificial Sequence
  Synthetic
gcaucaucuuuucuuucaaaac

SEQ ID NO: 11483 - RNA, 22 nt, Artificial Sequence
  Synthetic
gcaucuguuuugaaagaaaaga

SEQ ID NO: 11484 - RNA, 22 nt, Artificial Sequence
  Synthetic
gccgcaucaucuuuucuuucaa

SEQ ID NO: 11485 - RNA, 22 nt, Artificial Sequence
  Synthetic
gcgcaucuguuuugaaagaaaa

SEQ ID NO: 11486 - RNA, 22 nt, Artificial Sequence
  Synthetic
ggcgcaucuguuuugaaagaaa

SEQ ID NO: 11487 - RNA, 22 nt, Artificial Sequence
  Synthetic
gggcgcaucuguuuugaaagaa

SEQ ID NO: 11488 - RNA, 22 nt, Artificial Sequence
  Synthetic
guuuugaaagaaaagaugaugc

SEQ ID NO: 11489 - RNA, 22 nt, Artificial Sequence
  Synthetic
uagaugaaacacgggcgcaucu

SEQ ID NO: 11490 - RNA, 22 nt, Artificial Sequence
  Synthetic
ucaaaacagaugcgcccguguu

SEQ ID NO: 11491 - RNA, 22 nt, Artificial Sequence
  Synthetic
ucaucuuuucuuucaaaacaga

SEQ ID NO: 11492 - RNA, 22 nt, Artificial Sequence
  Synthetic
ucuguuuugaaagaaaagauga

SEQ ID NO: 11493 - RNA, 22 nt, Artificial Sequence
  Synthetic
ucuuucaaaacagaugcgcccg

SEQ ID NO: 11494 - RNA, 22 nt, Artificial Sequence
  Synthetic
ucuuuucuuucaaaacagaugc

SEQ ID NO: 11495 - RNA, 22 nt, Artificial Sequence
  Synthetic
ugaaacacgggcgcaucuguuu

SEQ ID NO: 11496 - RNA, 22 nt, Artificial Sequence
  Synthetic
uguuuugaaagaaaagaugaug

SEQ ID NO: 11497 - RNA, 22 nt, Artificial Sequence
  Synthetic
uucaaaacagaugcgcccgugu

SEQ ID NO: 11498 - RNA, 22 nt, Artificial Sequence
  Synthetic
uucuuucaaaacagaugcgccc

SEQ ID NO: 11499 - RNA, 22 nt, Artificial Sequence
  Synthetic
uuucaaaacagaugcgcccgug

SEQ ID NO: 11500 - RNA, 22 nt, Artificial Sequence
  Synthetic
uuucuuucaaaacagaugcgcc

SEQ ID NO: 11501 - RNA, 22 nt, Artificial Sequence
  Synthetic
uuugaaagaaaagaugaugcgg

SEQ ID NO: 11502 - RNA, 22 nt, Artificial Sequence
  Synthetic
uuuucuuucaaaacagaugcgc

SEQ ID NO: 11503 - RNA, 22 nt, Artificial Sequence
  Synthetic
uuuugaaagaaaagaugaugcg

SEQ ID NO: 11504 - RNA, 20 nt, Artificial Sequence
  Synthetic
aaacacgggugcaucuguug

SEQ ID NO: 11505 - RNA, 20 nt, Artificial Sequence
  Synthetic
aacaacagaugcacccgugu

SEQ ID NO: 11506 - RNA, 20 nt, Artificial Sequence
  Synthetic
aacacgggugcaucuguugu

SEQ ID NO: 11507 - RNA, 20 nt, Artificial Sequence
  Synthetic
aacagaugcacccguguuuc

SEQ ID NO: 11508 - RNA, 20 nt, Artificial Sequence
  Synthetic
acaacagaugcacccguguu

SEQ ID NO: 11509 - RNA, 20 nt, Artificial Sequence
  Synthetic
acacgggugcaucuguuguu

SEQ ID NO: 11510 - RNA, 20 nt, Artificial Sequence
  Synthetic
acagaugcacccguguuuca

SEQ ID NO: 11511 - RNA, 20 nt, Artificial Sequence
  Synthetic
acgggugcaucuguuguuga

SEQ ID NO: 11512 - RNA, 20 nt, Artificial Sequence
  Synthetic
agaugaaacacgggugcauc

SEQ ID NO: 11513 - RNA, 20 nt, Artificial Sequence
  Synthetic
agaugcacccguguuucauc

SEQ ID NO: 11514 - RNA, 20 nt, Artificial Sequence
  Synthetic
auagaugaaacacgggugca

SEQ ID NO: 11515 - RNA, 20 nt, Artificial Sequence
  Synthetic
auccauagaugaaacacggg

SEQ ID NO: 11516 - RNA, 20 nt, Artificial Sequence
  Synthetic
augaaacacgggugcaucug

SEQ ID NO: 11517 - RNA, 20 nt, Artificial Sequence
  Synthetic
augcacccguguuucaucua

SEQ ID NO: 11518 - RNA, 20 nt, Artificial Sequence
  Synthetic
caacaacagaugcacccgug

SEQ ID NO: 11519 - RNA, 20 nt, Artificial Sequence
  Synthetic
caacagaugcacccguguuu

SEQ ID NO: 11520 - RNA, 20 nt, Artificial Sequence
  Synthetic
cacccguguuucaucuaugg

SEQ ID NO: 11521 - RNA, 20 nt, Artificial Sequence
  Synthetic
cacgggugcaucuguuguug

SEQ ID NO: 11522 - RNA, 20 nt, Artificial Sequence
  Synthetic
cagaugcacccguguuucau

SEQ ID NO: 11523 - RNA, 20 nt, Artificial Sequence
  Synthetic
cauagaugaaacacgggugc

SEQ ID NO: 11524 - RNA, 20 nt, Artificial Sequence
  Synthetic
ccauagaugaaacacgggug

SEQ ID NO: 11525 - RNA, 20 nt, Artificial Sequence
  Synthetic
cgggugcaucuguuguugaa

SEQ ID NO: 11526 - RNA, 20 nt, Artificial Sequence
  Synthetic
cuauccauagaugaaacacg

SEQ ID NO: 11527 - RNA, 20 nt, Artificial Sequence
  Synthetic
cuuucaacaacagaugcacc

SEQ ID NO: 11528 - RNA, 20 nt, Artificial Sequence
  Synthetic
cuuuucuuucaacaacagau

SEQ ID NO: 11529 - RNA, 20 nt, Artificial Sequence
  Synthetic
gaaacacgggugcaucuguu

SEQ ID NO: 11530 - RNA, 20 nt, Artificial Sequence
  Synthetic
gaugaaacacgggugcaucu

SEQ ID NO: 11531 - RNA, 20 nt, Artificial Sequence
  Synthetic
gaugcacccguguuucaucu

SEQ ID NO: 11532 - RNA, 20 nt, Artificial Sequence
  Synthetic
gcacccguguuucaucuaug

SEQ ID NO: 11533 - RNA, 20 nt, Artificial Sequence
  Synthetic
gggugcaucuguuguugaaa

SEQ ID NO: 11534 - RNA, 20 nt, Artificial Sequence
  Synthetic
ggugcaucuguuguugaaag

SEQ ID NO: 11535 - RNA, 20 nt, Artificial Sequence
  Synthetic
gugcaucuguuguugaaaga

SEQ ID NO: 11536 - RNA, 20 nt, Artificial Sequence
  Synthetic
uagaugaaacacgggugcau

SEQ ID NO: 11537 - RNA, 20 nt, Artificial Sequence
  Synthetic
uauccauagaugaaacacgg

SEQ ID NO: 11538 - RNA, 20 nt, Artificial Sequence
  Synthetic
ucaacaacagaugcacccgu

SEQ ID NO: 11539 - RNA, 20 nt, Artificial Sequence
  Synthetic
uccauagaugaaacacgggu

SEQ ID NO: 11540 - RNA, 20 nt, Artificial Sequence
  Synthetic
ucuauccauagaugaaacac

SEQ ID NO: 11541 - RNA, 20 nt, Artificial Sequence
  Synthetic
ucuuucaacaacagaugcac

SEQ ID NO: 11542 - RNA, 20 nt, Artificial Sequence
  Synthetic
ucuuuucuuucaacaacaga

SEQ ID NO: 11543 - RNA, 20 nt, Artificial Sequence
  Synthetic
ugaaacacgggugcaucugu

SEQ ID NO: 11544 - RNA, 20 nt, Artificial Sequence
  Synthetic
ugcacccguguuucaucuau

SEQ ID NO: 11545 - RNA, 20 nt, Artificial Sequence
  Synthetic
uucaacaacagaugcacccg

SEQ ID NO: 11546 - RNA, 20 nt, Artificial Sequence
  Synthetic
uucuuucaacaacagaugca

SEQ ID NO: 11547 - RNA, 20 nt, Artificial Sequence
  Synthetic
uuucaacaacagaugcaccc

SEQ ID NO: 11548 - RNA, 20 nt, Artificial Sequence
  Synthetic
uuucuuucaacaacagaugc

SEQ ID NO: 11549 - RNA, 20 nt, Artificial Sequence
  Synthetic
uuuucuuucaacaacagaug

SEQ ID NO: 11550 - RNA, 21 nt, Artificial Sequence
  Synthetic
aaacacgggugcaucuguugu

SEQ ID NO: 11551 - RNA, 21 nt, Artificial Sequence
  Synthetic
aacaacagaugcacccguguu

SEQ ID NO: 11552 - RNA, 21 nt, Artificial Sequence
  Synthetic
aacacgggugcaucuguuguu

SEQ ID NO: 11553 - RNA, 21 nt, Artificial Sequence
  Synthetic
aacagaugcacccguguuuca

SEQ ID NO: 11554 - RNA, 21 nt, Artificial Sequence
  Synthetic
acaacagaugcacccguguuu

SEQ ID NO: 11555 - RNA, 21 nt, Artificial Sequence
  Synthetic
acacgggugcaucuguuguug

SEQ ID NO: 11556 - RNA, 21 nt, Artificial Sequence
  Synthetic
acagaugcacccguguuucau

SEQ ID NO: 11557 - RNA, 21 nt, Artificial Sequence
  Synthetic
acgggugcaucuguuguugaa

SEQ ID NO: 11558 - RNA, 21 nt, Artificial Sequence
  Synthetic
agaugaaacacgggugcaucu

SEQ ID NO: 11559 - RNA, 21 nt, Artificial Sequence
  Synthetic
agaugcacccguguuucaucu

SEQ ID NO: 11560 - RNA, 21 nt, Artificial Sequence
  Synthetic
auagaugaaacacgggugcau

SEQ ID NO: 11561 - RNA, 21 nt, Artificial Sequence
  Synthetic
auccauagaugaaacacgggu

SEQ ID NO: 11562 - RNA, 21 nt, Artificial Sequence
  Synthetic
aucuuuucuuucaacaacaga

SEQ ID NO: 11563 - RNA, 21 nt, Artificial Sequence
  Synthetic
augaaacacgggugcaucugu

SEQ ID NO: 11564 - RNA, 21 nt, Artificial Sequence
  Synthetic
augcacccguguuucaucuau

SEQ ID NO: 11565 - RNA, 21 nt, Artificial Sequence
  Synthetic
caacaacagaugcacccgugu

SEQ ID NO: 11566 - RNA, 21 nt, Artificial Sequence
  Synthetic
caacagaugcacccguguuuc

SEQ ID NO: 11567 - RNA, 21 nt, Artificial Sequence
  Synthetic
cacccguguuucaucuaugga

SEQ ID NO: 11568 - RNA, 21 nt, Artificial Sequence
  Synthetic
cacgggugcaucuguuguuga

SEQ ID NO: 11569 - RNA, 21 nt, Artificial Sequence
  Synthetic
cagaugcacccguguuucauc

SEQ ID NO: 11570 - RNA, 21 nt, Artificial Sequence
  Synthetic
cauagaugaaacacgggugca

SEQ ID NO: 11571 - RNA, 21 nt, Artificial Sequence
  Synthetic
ccauagaugaaacacgggugc

SEQ ID NO: 11572 - RNA, 21 nt, Artificial Sequence
  Synthetic
cgggugcaucuguuguugaaa

SEQ ID NO: 11573 - RNA, 21 nt, Artificial Sequence
  Synthetic
cuauccauagaugaaacacgg

SEQ ID NO: 11574 - RNA, 21 nt, Artificial Sequence
  Synthetic
cucuauccauagaugaaacac

SEQ ID NO: 11575 - RNA, 21 nt, Artificial Sequence
  Synthetic
cuuucaacaacagaugcaccc

SEQ ID NO: 11576 - RNA, 21 nt, Artificial Sequence
  Synthetic
cuuuucuuucaacaacagaug

SEQ ID NO: 11577 - RNA, 21 nt, Artificial Sequence
  Synthetic
gaaacacgggugcaucuguug

SEQ ID NO: 11578 - RNA, 21 nt, Artificial Sequence
  Synthetic
gaugaaacacgggugcaucug

SEQ ID NO: 11579 - RNA, 21 nt, Artificial Sequence
  Synthetic
gaugcacccguguuucaucua

SEQ ID NO: 11580 - RNA, 21 nt, Artificial Sequence
  Synthetic
gcacccguguuucaucuaugg

SEQ ID NO: 11581 - RNA, 21 nt, Artificial Sequence
  Synthetic
gggugcaucuguuguugaaag

SEQ ID NO: 11582 - RNA, 21 nt, Artificial Sequence
  Synthetic
ggugcaucuguuguugaaaga

SEQ ID NO: 11583 - RNA, 21 nt, Artificial Sequence
  Synthetic
gugcaucuguuguugaaagaa

SEQ ID NO: 11584 - RNA, 21 nt, Artificial Sequence
  Synthetic
uagaugaaacacgggugcauc

SEQ ID NO: 11585 - RNA, 21 nt, Artificial Sequence
  Synthetic
uauccauagaugaaacacggg

SEQ ID NO: 11586 - RNA, 21 nt, Artificial Sequence
  Synthetic
ucaacaacagaugcacccgug

SEQ ID NO: 11587 - RNA, 21 nt, Artificial Sequence
  Synthetic
uccauagaugaaacacgggug

SEQ ID NO: 11588 - RNA, 21 nt, Artificial Sequence
  Synthetic
ucuauccauagaugaaacacg

SEQ ID NO: 11589 - RNA, 21 nt, Artificial Sequence
  Synthetic
ucuuucaacaacagaugcacc

SEQ ID NO: 11590 - RNA, 21 nt, Artificial Sequence
  Synthetic
ucuuuucuuucaacaacagau

SEQ ID NO: 11591 - RNA, 21 nt, Artificial Sequence
  Synthetic
ugaaacacgggugcaucuguu

SEQ ID NO: 11592 - RNA, 21 nt, Artificial Sequence
  Synthetic
ugcacccguguuucaucuaug

SEQ ID NO: 11593 - RNA, 21 nt, Artificial Sequence
  Synthetic
uucaacaacagaugcacccgu

SEQ ID NO: 11594 - RNA, 21 nt, Artificial Sequence
  Synthetic
uucuuucaacaacagaugcac

SEQ ID NO: 11595 - RNA, 21 nt, Artificial Sequence
  Synthetic
uuucaacaacagaugcacccg

SEQ ID NO: 11596 - RNA, 21 nt, Artificial Sequence
  Synthetic
uuucuuucaacaacagaugca

SEQ ID NO: 11597 - RNA, 21 nt, Artificial Sequence
  Synthetic
uuuucuuucaacaacagaugc

SEQ ID NO: 11598 - RNA, 22 nt, Artificial Sequence
  Synthetic
aaacacgggugcaucuguuguu

SEQ ID NO: 11599 - RNA, 22 nt, Artificial Sequence
  Synthetic
aacaacagaugcacccguguuu

SEQ ID NO: 11600 - RNA, 22 nt, Artificial Sequence
  Synthetic
aacacgggugcaucuguuguug

SEQ ID NO: 11601 - RNA, 22 nt, Artificial Sequence
  Synthetic
aacagaugcacccguguuucau

SEQ ID NO: 11602 - RNA, 22 nt, Artificial Sequence
  Synthetic
acaacagaugcacccguguuuc

SEQ ID NO: 11603 - RNA, 22 nt, Artificial Sequence
  Synthetic
acacgggugcaucuguuguuga

SEQ ID NO: 11604 - RNA, 22 nt, Artificial Sequence
  Synthetic
acagaugcacccguguuucauc

SEQ ID NO: 11605 - RNA, 22 nt, Artificial Sequence
  Synthetic
acgggugcaucuguuguugaaa

SEQ ID NO: 11606 - RNA, 22 nt, Artificial Sequence
  Synthetic
agaugaaacacgggugcaucug

SEQ ID NO: 11607 - RNA, 22 nt, Artificial Sequence
  Synthetic
agaugcacccguguuucaucua

SEQ ID NO: 11608 - RNA, 22 nt, Artificial Sequence
  Synthetic
auagaugaaacacgggugcauc

SEQ ID NO: 11609 - RNA, 22 nt, Artificial Sequence
  Synthetic
auccauagaugaaacacgggug

SEQ ID NO: 11610 - RNA, 22 nt, Artificial Sequence
  Synthetic
aucuuuucuuucaacaacagau

SEQ ID NO: 11611 - RNA, 22 nt, Artificial Sequence
  Synthetic
augaaacacgggugcaucuguu

SEQ ID NO: 11612 - RNA, 22 nt, Artificial Sequence
  Synthetic
augcacccguguuucaucuaug

SEQ ID NO: 11613 - RNA, 22 nt, Artificial Sequence
  Synthetic
caacaacagaugcacccguguu

SEQ ID NO: 11614 - RNA, 22 nt, Artificial Sequence
  Synthetic
caacagaugcacccguguuuca

SEQ ID NO: 11615 - RNA, 22 nt, Artificial Sequence
  Synthetic
cacccguguuucaucuauggau

SEQ ID NO: 11616 - RNA, 22 nt, Artificial Sequence
  Synthetic
cacgggugcaucuguuguugaa

SEQ ID NO: 11617 - RNA, 22 nt, Artificial Sequence
  Synthetic
cagaugcacccguguuucaucu

SEQ ID NO: 11618 - RNA, 22 nt, Artificial Sequence
  Synthetic
cauagaugaaacacgggugcau

SEQ ID NO: 11619 - RNA, 22 nt, Artificial Sequence
  Synthetic
caucuuuucuuucaacaacaga

SEQ ID NO: 11620 - RNA, 22 nt, Artificial Sequence
  Synthetic
ccauagaugaaacacgggugca

SEQ ID NO: 11621 - RNA, 22 nt, Artificial Sequence
  Synthetic
cgggugcaucuguuguugaaag

SEQ ID NO: 11622 - RNA, 22 nt, Artificial Sequence
  Synthetic
cuauccauagaugaaacacggg

SEQ ID NO: 11623 - RNA, 22 nt, Artificial Sequence
  Synthetic
cucuauccauagaugaaacacg

SEQ ID NO: 11624 - RNA, 22 nt, Artificial Sequence
  Synthetic
cuuucaacaacagaugcacccg

SEQ ID NO: 11625 - RNA, 22 nt, Artificial Sequence
  Synthetic
cuuuucuuucaacaacagaugc

SEQ ID NO: 11626 - RNA, 22 nt, Artificial Sequence
  Synthetic
gaaacacgggugcaucuguugu

SEQ ID NO: 11627 - RNA, 22 nt, Artificial Sequence
  Synthetic
gaugaaacacgggugcaucugu

SEQ ID NO: 11628 - RNA, 22 nt, Artificial Sequence
  Synthetic
gaugcacccguguuucaucuau

SEQ ID NO: 11629 - RNA, 22 nt, Artificial Sequence
  Synthetic
gcacccguguuucaucuaugga

SEQ ID NO: 11630 - RNA, 22 nt, Artificial Sequence
  Synthetic
gcucuauccauagaugaaacac

SEQ ID NO: 11631 - RNA, 22 nt, Artificial Sequence
  Synthetic
gggugcaucuguuguugaaaga

SEQ ID NO: 11632 - RNA, 22 nt, Artificial Sequence
  Synthetic
ggugcaucuguuguugaaagaa

SEQ ID NO: 11633 - RNA, 22 nt, Artificial Sequence
  Synthetic
gugcaucuguuguugaaagaaa

SEQ ID NO: 11634 - RNA, 22 nt, Artificial Sequence
  Synthetic
uagaugaaacacgggugcaucu

SEQ ID NO: 11635 - RNA, 22 nt, Artificial Sequence
  Synthetic
uauccauagaugaaacacgggu

SEQ ID NO: 11636 - RNA, 22 nt, Artificial Sequence
  Synthetic
ucaacaacagaugcacccgugu

SEQ ID NO: 11637 - RNA, 22 nt, Artificial Sequence
  Synthetic
uccauagaugaaacacgggugc

SEQ ID NO: 11638 - RNA, 22 nt, Artificial Sequence
  Synthetic
ucuauccauagaugaaacacgg

SEQ ID NO: 11639 - RNA, 22 nt, Artificial Sequence
  Synthetic
ucuuucaacaacagaugcaccc

SEQ ID NO: 11640 - RNA, 22 nt, Artificial Sequence
  Synthetic
ucuuuucuuucaacaacagaug

SEQ ID NO: 11641 - RNA, 22 nt, Artificial Sequence
  Synthetic
ugaaacacgggugcaucuguug

SEQ ID NO: 11642 - RNA, 22 nt, Artificial Sequence
  Synthetic
ugcacccguguuucaucuaugg

SEQ ID NO: 11643 - RNA, 22 nt, Artificial Sequence
  Synthetic
uucaacaacagaugcacccgug

SEQ ID NO: 11644 - RNA, 22 nt, Artificial Sequence
  Synthetic
uucuuucaacaacagaugcacc

SEQ ID NO: 11645 - RNA, 22 nt, Artificial Sequence
  Synthetic
uuucaacaacagaugcacccgu

SEQ ID NO: 11646 - RNA, 22 nt, Artificial Sequence
  Synthetic
uuucuuucaacaacagaugcac

SEQ ID NO: 11647 - RNA, 22 nt, Artificial Sequence
  Synthetic
uuuucuuucaacaacagaugca

SEQ ID NO: 11648 - RNA, 20 nt, Artificial Sequence
  Synthetic
aaacaugggcgcaucuguug

SEQ ID NO: 11649 - RNA, 20 nt, Artificial Sequence
  Synthetic
aacaacagaugcgcccaugu

SEQ ID NO: 11650 - RNA, 20 nt, Artificial Sequence
  Synthetic
aacagaugcgcccauguuuc

SEQ ID NO: 11651 - RNA, 20 nt, Artificial Sequence
  Synthetic
aacaugggcgcaucuguugu

SEQ ID NO: 11652 - RNA, 20 nt, Artificial Sequence
  Synthetic
acaacagaugcgcccauguu

SEQ ID NO: 11653 - RNA, 20 nt, Artificial Sequence
  Synthetic
acagaugcgcccauguuuca

SEQ ID NO: 11654 - RNA, 20 nt, Artificial Sequence
  Synthetic
acaugggcgcaucuguuguu

SEQ ID NO: 11655 - RNA, 20 nt, Artificial Sequence
  Synthetic
agaugaaacaugggcgcauc

SEQ ID NO: 11656 - RNA, 20 nt, Artificial Sequence
  Synthetic
agaugcgcccauguuucauc

SEQ ID NO: 11657 - RNA, 20 nt, Artificial Sequence
  Synthetic
agcucuauccauagaugaaa

SEQ ID NO: 11658 - RNA, 20 nt, Artificial Sequence
  Synthetic
auagaugaaacaugggcgca

SEQ ID NO: 11659 - RNA, 20 nt, Artificial Sequence
  Synthetic
auccauagaugaaacauggg

SEQ ID NO: 11660 - RNA, 20 nt, Artificial Sequence
  Synthetic
augaaacaugggcgcaucug

SEQ ID NO: 11661 - RNA, 20 nt, Artificial Sequence
  Synthetic
augcgcccauguuucaucua

SEQ ID NO: 11662 - RNA, 20 nt, Artificial Sequence
  Synthetic
augggcgcaucuguuguuga

SEQ ID NO: 11663 - RNA, 20 nt, Artificial Sequence
  Synthetic
caacaacagaugcgcccaug

SEQ ID NO: 11664 - RNA, 20 nt, Artificial Sequence
  Synthetic
caacagaugcgcccauguuu

SEQ ID NO: 11665 - RNA, 20 nt, Artificial Sequence
  Synthetic
cagaugcgcccauguuucau

SEQ ID NO: 11666 - RNA, 20 nt, Artificial Sequence
  Synthetic
cagcucuauccauagaugaa

SEQ ID NO: 11667 - RNA, 20 nt, Artificial Sequence
  Synthetic
cauagaugaaacaugggcgc

SEQ ID NO: 11668 - RNA, 20 nt, Artificial Sequence
  Synthetic
caugggcgcaucuguuguug

SEQ ID NO: 11669 - RNA, 20 nt, Artificial Sequence
  Synthetic
cauguuucaucuauggauag

SEQ ID NO: 11670 - RNA, 20 nt, Artificial Sequence
  Synthetic
ccauagaugaaacaugggcg

SEQ ID NO: 11671 - RNA, 20 nt, Artificial Sequence
  Synthetic
ccauguuucaucuauggaua

SEQ ID NO: 11672 - RNA, 20 nt, Artificial Sequence
  Synthetic
cccauguuucaucuauggau

SEQ ID NO: 11673 - RNA, 20 nt, Artificial Sequence
  Synthetic
cgcccauguuucaucuaugg

SEQ ID NO: 11674 - RNA, 20 nt, Artificial Sequence
  Synthetic
cuauccauagaugaaacaug

SEQ ID NO: 11675 - RNA, 20 nt, Artificial Sequence
  Synthetic
cucuauccauagaugaaaca

SEQ ID NO: 11676 - RNA, 20 nt, Artificial Sequence
  Synthetic
cuuucaacaacagaugcgcc

SEQ ID NO: 11677 - RNA, 20 nt, Artificial Sequence
  Synthetic
gaaacaugggcgcaucuguu

SEQ ID NO: 11678 - RNA, 20 nt, Artificial Sequence
  Synthetic
gaugaaacaugggcgcaucu

SEQ ID NO: 11679 - RNA, 20 nt, Artificial Sequence
  Synthetic
gaugcgcccauguuucaucu

SEQ ID NO: 11680 - RNA, 20 nt, Artificial Sequence
  Synthetic
gcccauguuucaucuaugga

SEQ ID NO: 11681 - RNA, 20 nt, Artificial Sequence
  Synthetic
gcgcccauguuucaucuaug

SEQ ID NO: 11682 - RNA, 20 nt, Artificial Sequence
  Synthetic
gcucuauccauagaugaaac

SEQ ID NO: 11683 - RNA, 20 nt, Artificial Sequence
  Synthetic
uagaugaaacaugggcgcau

SEQ ID NO: 11684 - RNA, 20 nt, Artificial Sequence
  Synthetic
uauccauagaugaaacaugg

SEQ ID NO: 11685 - RNA, 20 nt, Artificial Sequence
  Synthetic
ucaacaacagaugcgcccau

SEQ ID NO: 11686 - RNA, 20 nt, Artificial Sequence
  Synthetic
uccauagaugaaacaugggc

SEQ ID NO: 11687 - RNA, 20 nt, Artificial Sequence
  Synthetic
ucuauccauagaugaaacau

SEQ ID NO: 11688 - RNA, 20 nt, Artificial Sequence
  Synthetic
ucuuucaacaacagaugcgc

SEQ ID NO: 11689 - RNA, 20 nt, Artificial Sequence
  Synthetic
ugaaacaugggcgcaucugu

SEQ ID NO: 11690 - RNA, 20 nt, Artificial Sequence
  Synthetic
ugcgcccauguuucaucuau

SEQ ID NO: 11691 - RNA, 20 nt, Artificial Sequence
  Synthetic
uucaacaacagaugcgccca

SEQ ID NO: 11692 - RNA, 20 nt, Artificial Sequence
  Synthetic
uucuuucaacaacagaugcg

SEQ ID NO: 11693 - RNA, 20 nt, Artificial Sequence
  Synthetic
uuucaacaacagaugcgccc

SEQ ID NO: 11694 - RNA, 21 nt, Artificial Sequence
  Synthetic
aaacaugggcgcaucuguugu

SEQ ID NO: 11695 - RNA, 21 nt, Artificial Sequence
  Synthetic
aacaacagaugcgcccauguu

SEQ ID NO: 11696 - RNA, 21 nt, Artificial Sequence
  Synthetic
aacagaugcgcccauguuuca

SEQ ID NO: 11697 - RNA, 21 nt, Artificial Sequence
  Synthetic
aacaugggcgcaucuguuguu

SEQ ID NO: 11698 - RNA, 21 nt, Artificial Sequence
  Synthetic
acaacagaugcgcccauguuu

SEQ ID NO: 11699 - RNA, 21 nt, Artificial Sequence
  Synthetic
acagaugcgcccauguuucau

SEQ ID NO: 11700 - RNA, 21 nt, Artificial Sequence
  Synthetic
acaugggcgcaucuguuguug

SEQ ID NO: 11701 - RNA, 21 nt, Artificial Sequence
  Synthetic
agaugaaacaugggcgcaucu

SEQ ID NO: 11702 - RNA, 21 nt, Artificial Sequence
  Synthetic
agaugcgcccauguuucaucu

SEQ ID NO: 11703 - RNA, 21 nt, Artificial Sequence
  Synthetic
agcucuauccauagaugaaac

SEQ ID NO: 11704 - RNA, 21 nt, Artificial Sequence
  Synthetic
auagaugaaacaugggcgcau

SEQ ID NO: 11705 - RNA, 21 nt, Artificial Sequence
  Synthetic
auccauagaugaaacaugggc

SEQ ID NO: 11706 - RNA, 21 nt, Artificial Sequence
  Synthetic
augaaacaugggcgcaucugu

SEQ ID NO: 11707 - RNA, 21 nt, Artificial Sequence
  Synthetic
augcgcccauguuucaucuau

SEQ ID NO: 11708 - RNA, 21 nt, Artificial Sequence
  Synthetic
augggcgcaucuguuguugaa

SEQ ID NO: 11709 - RNA, 21 nt, Artificial Sequence
  Synthetic
caacaacagaugcgcccaugu

SEQ ID NO: 11710 - RNA, 21 nt, Artificial Sequence
  Synthetic
caacagaugcgcccauguuuc

SEQ ID NO: 11711 - RNA, 21 nt, Artificial Sequence
  Synthetic
cagaugcgcccauguuucauc

SEQ ID NO: 11712 - RNA, 21 nt, Artificial Sequence
  Synthetic
cagcucuauccauagaugaaa

SEQ ID NO: 11713 - RNA, 21 nt, Artificial Sequence
  Synthetic
cauagaugaaacaugggcgca

SEQ ID NO: 11714 - RNA, 21 nt, Artificial Sequence
  Synthetic
caugggcgcaucuguuguuga

SEQ ID NO: 11715 - RNA, 21 nt, Artificial Sequence
  Synthetic
cauguuucaucuauggauaga

SEQ ID NO: 11716 - RNA, 21 nt, Artificial Sequence
  Synthetic
ccauagaugaaacaugggcgc

SEQ ID NO: 11717 - RNA, 21 nt, Artificial Sequence
  Synthetic
ccauguuucaucuauggauag

SEQ ID NO: 11718 - RNA, 21 nt, Artificial Sequence
  Synthetic
cccauguuucaucuauggaua

SEQ ID NO: 11719 - RNA, 21 nt, Artificial Sequence
  Synthetic
cgcccauguuucaucuaugga

SEQ ID NO: 11720 - RNA, 21 nt, Artificial Sequence
  Synthetic
cuauccauagaugaaacaugg

SEQ ID NO: 11721 - RNA, 21 nt, Artificial Sequence
  Synthetic
cucuauccauagaugaaacau

SEQ ID NO: 11722 - RNA, 21 nt, Artificial Sequence
  Synthetic
cuuucaacaacagaugcgccc

SEQ ID NO: 11723 - RNA, 21 nt, Artificial Sequence
  Synthetic
gaaacaugggcgcaucuguug

SEQ ID NO: 11724 - RNA, 21 nt, Artificial Sequence
  Synthetic
gaugaaacaugggcgcaucug

SEQ ID NO: 11725 - RNA, 21 nt, Artificial Sequence
  Synthetic
gaugcgcccauguuucaucua

SEQ ID NO: 11726 - RNA, 21 nt, Artificial Sequence
  Synthetic
gcccauguuucaucuauggau

SEQ ID NO: 11727 - RNA, 21 nt, Artificial Sequence
  Synthetic
gcgcccauguuucaucuaugg

SEQ ID NO: 11728 - RNA, 21 nt, Artificial Sequence
  Synthetic
gcucuauccauagaugaaaca

SEQ ID NO: 11729 - RNA, 21 nt, Artificial Sequence
  Synthetic
uagaugaaacaugggcgcauc

SEQ ID NO: 11730 - RNA, 21 nt, Artificial Sequence
  Synthetic
uauccauagaugaaacauggg

SEQ ID NO: 11731 - RNA, 21 nt, Artificial Sequence
  Synthetic
ucaacaacagaugcgcccaug

SEQ ID NO: 11732 - RNA, 21 nt, Artificial Sequence
  Synthetic
ucagcucuauccauagaugaa

SEQ ID NO: 11733 - RNA, 21 nt, Artificial Sequence
  Synthetic
uccauagaugaaacaugggcg

SEQ ID NO: 11734 - RNA, 21 nt, Artificial Sequence
  Synthetic
ucuauccauagaugaaacaug

SEQ ID NO: 11735 - RNA, 21 nt, Artificial Sequence
  Synthetic
ucuuucaacaacagaugcgcc

SEQ ID NO: 11736 - RNA, 21 nt, Artificial Sequence
  Synthetic
ugaaacaugggcgcaucuguu

SEQ ID NO: 11737 - RNA, 21 nt, Artificial Sequence
  Synthetic
ugcgcccauguuucaucuaug

SEQ ID NO: 11738 - RNA, 21 nt, Artificial Sequence
  Synthetic
uucaacaacagaugcgcccau

SEQ ID NO: 11739 - RNA, 21 nt, Artificial Sequence
  Synthetic
uucuuucaacaacagaugcgc

SEQ ID NO: 11740 - RNA, 21 nt, Artificial Sequence
  Synthetic
uuucaacaacagaugcgccca

SEQ ID NO: 11741 - RNA, 21 nt, Artificial Sequence
  Synthetic
uuucuuucaacaacagaugcg

SEQ ID NO: 11742 - RNA, 22 nt, Artificial Sequence
  Synthetic
aaacaugggcgcaucuguuguu

SEQ ID NO: 11743 - RNA, 22 nt, Artificial Sequence
  Synthetic
aacaacagaugcgcccauguuu

SEQ ID NO: 11744 - RNA, 22 nt, Artificial Sequence
  Synthetic
aacagaugcgcccauguuucau

SEQ ID NO: 11745 - RNA, 22 nt, Artificial Sequence
  Synthetic
aacaugggcgcaucuguuguug

SEQ ID NO: 11746 - RNA, 22 nt, Artificial Sequence
  Synthetic
acaacagaugcgcccauguuuc

SEQ ID NO: 11747 - RNA, 22 nt, Artificial Sequence
  Synthetic
acagaugcgcccauguuucauc

SEQ ID NO: 11748 - RNA, 22 nt, Artificial Sequence
  Synthetic
acaugggcgcaucuguuguuga

SEQ ID NO: 11749 - RNA, 22 nt, Artificial Sequence
  Synthetic
agaugaaacaugggcgcaucug

SEQ ID NO: 11750 - RNA, 22 nt, Artificial Sequence
  Synthetic
agaugcgcccauguuucaucua

SEQ ID NO: 11751 - RNA, 22 nt, Artificial Sequence
  Synthetic
agcucuauccauagaugaaaca

SEQ ID NO: 11752 - RNA, 22 nt, Artificial Sequence
  Synthetic
auagaugaaacaugggcgcauc

SEQ ID NO: 11753 - RNA, 22 nt, Artificial Sequence
  Synthetic
auccauagaugaaacaugggcg

SEQ ID NO: 11754 - RNA, 22 nt, Artificial Sequence
  Synthetic
augaaacaugggcgcaucuguu

SEQ ID NO: 11755 - RNA, 22 nt, Artificial Sequence
  Synthetic
augcgcccauguuucaucuaug

SEQ ID NO: 11756 - RNA, 22 nt, Artificial Sequence
  Synthetic
augggcgcaucuguuguugaaa

SEQ ID NO: 11757 - RNA, 22 nt, Artificial Sequence
  Synthetic
caacaacagaugcgcccauguu

SEQ ID NO: 11758 - RNA, 22 nt, Artificial Sequence
  Synthetic
caacagaugcgcccauguuuca

SEQ ID NO: 11759 - RNA, 22 nt, Artificial Sequence
  Synthetic
cagaugcgcccauguuucaucu

SEQ ID NO: 11760 - RNA, 22 nt, Artificial Sequence
  Synthetic
cagcucuauccauagaugaaac

SEQ ID NO: 11761 - RNA, 22 nt, Artificial Sequence
  Synthetic
cauagaugaaacaugggcgcau

SEQ ID NO: 11762 - RNA, 22 nt, Artificial Sequence
  Synthetic
caugggcgcaucuguuguugaa

SEQ ID NO: 11763 - RNA, 22 nt, Artificial Sequence
  Synthetic
cauguuucaucuauggauagag

SEQ ID NO: 11764 - RNA, 22 nt, Artificial Sequence
  Synthetic
ccauagaugaaacaugggcgca

SEQ ID NO: 11765 - RNA, 22 nt, Artificial Sequence
  Synthetic
ccauguuucaucuauggauaga

SEQ ID NO: 11766 - RNA, 22 nt, Artificial Sequence
  Synthetic
cccauguuucaucuauggauag

SEQ ID NO: 11767 - RNA, 22 nt, Artificial Sequence
  Synthetic
cgcccauguuucaucuauggau

SEQ ID NO: 11768 - RNA, 22 nt, Artificial Sequence
  Synthetic
cuauccauagaugaaacauggg

SEQ ID NO: 11769 - RNA, 22 nt, Artificial Sequence
  Synthetic
cucagcucuauccauagaugaa

SEQ ID NO: 11770 - RNA, 22 nt, Artificial Sequence
  Synthetic
cucuauccauagaugaaacaug

SEQ ID NO: 11771 - RNA, 22 nt, Artificial Sequence
  Synthetic
cuuucaacaacagaugcgccca

SEQ ID NO: 11772 - RNA, 22 nt, Artificial Sequence
  Synthetic
gaaacaugggcgcaucuguugu

SEQ ID NO: 11773 - RNA, 22 nt, Artificial Sequence
  Synthetic
gaugaaacaugggcgcaucugu

SEQ ID NO: 11774 - RNA, 22 nt, Artificial Sequence
  Synthetic
gaugcgcccauguuucaucuau

SEQ ID NO: 11775 - RNA, 22 nt, Artificial Sequence
  Synthetic
gcccauguuucaucuauggaua

SEQ ID NO: 11776 - RNA, 22 nt, Artificial Sequence
  Synthetic
gcgcccauguuucaucuaugga

SEQ ID NO: 11777 - RNA, 22 nt, Artificial Sequence
  Synthetic
gcucuauccauagaugaaacau

SEQ ID NO: 11778 - RNA, 22 nt, Artificial Sequence
  Synthetic
uagaugaaacaugggcgcaucu

SEQ ID NO: 11779 - RNA, 22 nt, Artificial Sequence
  Synthetic
uauccauagaugaaacaugggc

SEQ ID NO: 11780 - RNA, 22 nt, Artificial Sequence
  Synthetic
ucaacaacagaugcgcccaugu

SEQ ID NO: 11781 - RNA, 22 nt, Artificial Sequence
  Synthetic
ucagcucuauccauagaugaaa

SEQ ID NO: 11782 - RNA, 22 nt, Artificial Sequence
  Synthetic
uccauagaugaaacaugggcgc

SEQ ID NO: 11783 - RNA, 22 nt, Artificial Sequence
  Synthetic
ucuauccauagaugaaacaugg

SEQ ID NO: 11784 - RNA, 22 nt, Artificial Sequence
  Synthetic
ucuuucaacaacagaugcgccc

SEQ ID NO: 11785 - RNA, 22 nt, Artificial Sequence
  Synthetic
ugaaacaugggcgcaucuguug

SEQ ID NO: 11786 - RNA, 22 nt, Artificial Sequence
  Synthetic
ugcgcccauguuucaucuaugg

SEQ ID NO: 11787 - RNA, 22 nt, Artificial Sequence
  Synthetic
uucaacaacagaugcgcccaug

SEQ ID NO: 11788 - RNA, 22 nt, Artificial Sequence
  Synthetic
uucuuucaacaacagaugcgcc

SEQ ID NO: 11789 - RNA, 22 nt, Artificial Sequence
  Synthetic
uuucaacaacagaugcgcccau

SEQ ID NO: 11790 - RNA, 22 nt, Artificial Sequence
  Synthetic
uuucuuucaacaacagaugcgc

SEQ ID NO: 11791 - RNA, 22 nt, Artificial Sequence
  Synthetic
uuuucuuucaacaacagaugcg

SEQ ID NO: 11792 - RNA, 20 nt, Artificial Sequence
  Synthetic
aaugucuuucuucggcucag

SEQ ID NO: 11793 - RNA, 20 nt, Artificial Sequence
  Synthetic
agcuccauccauagaugaaa

SEQ ID NO: 11794 - RNA, 20 nt, Artificial Sequence
  Synthetic
aucuauggauggagcugagc

SEQ ID NO: 11795 - RNA, 20 nt, Artificial Sequence
  Synthetic
auggagcugagccgaagaaa

SEQ ID NO: 11796 - RNA, 20 nt, Artificial Sequence
  Synthetic
auggauggagcugagccgaa

SEQ ID NO: 11797 - RNA, 20 nt, Artificial Sequence
  Synthetic
augucuuucuucggcucagc

SEQ ID NO: 11798 - RNA, 20 nt, Artificial Sequence
  Synthetic
cagcuccauccauagaugaa

SEQ ID NO: 11799 - RNA, 20 nt, Artificial Sequence
  Synthetic
caucuauggauggagcugag

SEQ ID NO: 11800 - RNA, 20 nt, Artificial Sequence
  Synthetic
ccauccauagaugaaacacg

SEQ ID NO: 11801 - RNA, 20 nt, Artificial Sequence
  Synthetic
cccguguuucaucuauggau

SEQ ID NO: 11802 - RNA, 20 nt, Artificial Sequence
  Synthetic
ccguguuucaucuauggaug

SEQ ID NO: 11803 - RNA, 20 nt, Artificial Sequence
  Synthetic
cgcccguguuucaucuaugg

SEQ ID NO: 11804 - RNA, 20 nt, Artificial Sequence
  Synthetic
cggcucagcuccauccauag

SEQ ID NO: 11805 - RNA, 20 nt, Artificial Sequence
  Synthetic
cguguuucaucuauggaugg

SEQ ID NO: 11806 - RNA, 20 nt, Artificial Sequence
  Synthetic
cuauggauggagcugagccg

SEQ ID NO: 11807 - RNA, 20 nt, Artificial Sequence
  Synthetic
cucagcuccauccauagaug

SEQ ID NO: 11808 - RNA, 20 nt, Artificial Sequence
  Synthetic
cuccauccauagaugaaaca

SEQ ID NO: 11809 - RNA, 20 nt, Artificial Sequence
  Synthetic
cuucggcucagcuccaucca

SEQ ID NO: 11810 - RNA, 20 nt, Artificial Sequence
  Synthetic
cuuucuucggcucagcucca

SEQ ID NO: 11811 - RNA, 20 nt, Artificial Sequence
  Synthetic
gauggagcugagccgaagaa

SEQ ID NO: 11812 - RNA, 20 nt, Artificial Sequence
  Synthetic
gcccguguuucaucuaugga

SEQ ID NO: 11813 - RNA, 20 nt, Artificial Sequence
  Synthetic
gcgcccguguuucaucuaug

SEQ ID NO: 11814 - RNA, 20 nt, Artificial Sequence
  Synthetic
gcucagcuccauccauagau

SEQ ID NO: 11815 - RNA, 20 nt, Artificial Sequence
  Synthetic
gcuccauccauagaugaaac

SEQ ID NO: 11816 - RNA, 20 nt, Artificial Sequence
  Synthetic
ggauggagcugagccgaaga

SEQ ID NO: 11817 - RNA, 20 nt, Artificial Sequence
  Synthetic
ggcucagcuccauccauaga

SEQ ID NO: 11818 - RNA, 20 nt, Artificial Sequence
  Synthetic
gucuuucuucggcucagcuc

SEQ ID NO: 11819 - RNA, 20 nt, Artificial Sequence
  Synthetic
guguuucaucuauggaugga

SEQ ID NO: 11820 - RNA, 20 nt, Artificial Sequence
  Synthetic
guuucaucuauggauggagc

SEQ ID NO: 11821 - RNA, 20 nt, Artificial Sequence
  Synthetic
uauggauggagcugagccga

SEQ ID NO: 11822 - RNA, 20 nt, Artificial Sequence
  Synthetic
ucagcuccauccauagauga

SEQ ID NO: 11823 - RNA, 20 nt, Artificial Sequence
  Synthetic
ucaucuauggauggagcuga

SEQ ID NO: 11824 - RNA, 20 nt, Artificial Sequence
  Synthetic
uccauccauagaugaaacac

SEQ ID NO: 11825 - RNA, 20 nt, Artificial Sequence
  Synthetic
ucggcucagcuccauccaua

SEQ ID NO: 11826 - RNA, 20 nt, Artificial Sequence
  Synthetic
ucuauggauggagcugagcc

SEQ ID NO: 11827 - RNA, 20 nt, Artificial Sequence
  Synthetic
ucuucggcucagcuccaucc

SEQ ID NO: 11828 - RNA, 20 nt, Artificial Sequence
  Synthetic
ucuuucuucggcucagcucc

SEQ ID NO: 11829 - RNA, 20 nt, Artificial Sequence
  Synthetic
uggagcugagccgaagaaag

SEQ ID NO: 11830 - RNA, 20 nt, Artificial Sequence
  Synthetic
uggauggagcugagccgaag

SEQ ID NO: 11831 - RNA, 20 nt, Artificial Sequence
  Synthetic
ugucuuucuucggcucagcu

SEQ ID NO: 11832 - RNA, 20 nt, Artificial Sequence
  Synthetic
uguuucaucuauggauggag

SEQ ID NO: 11833 - RNA, 20 nt, Artificial Sequence
  Synthetic
uucaucuauggauggagcug

SEQ ID NO: 11834 - RNA, 20 nt, Artificial Sequence
  Synthetic
uucggcucagcuccauccau

SEQ ID NO: 11835 - RNA, 20 nt, Artificial Sequence
  Synthetic
uucuucggcucagcuccauc

SEQ ID NO: 11836 - RNA, 20 nt, Artificial Sequence
  Synthetic
uuucaucuauggauggagcu

SEQ ID NO: 11837 - RNA, 20 nt, Artificial Sequence
  Synthetic
uuucuucggcucagcuccau

SEQ ID NO: 11838 - RNA, 21 nt, Artificial Sequence
  Synthetic
aaugucuuucuucggcucagc

SEQ ID NO: 11839 - RNA, 21 nt, Artificial Sequence
  Synthetic
agcuccauccauagaugaaac

SEQ ID NO: 11840 - RNA, 21 nt, Artificial Sequence
  Synthetic
aucuauggauggagcugagcc

SEQ ID NO: 11841 - RNA, 21 nt, Artificial Sequence
  Synthetic
auggagcugagccgaagaaag

SEQ ID NO: 11842 - RNA, 21 nt, Artificial Sequence
  Synthetic
auggauggagcugagccgaag

SEQ ID NO: 11843 - RNA, 21 nt, Artificial Sequence
  Synthetic
augucuuucuucggcucagcu

SEQ ID NO: 11844 - RNA, 21 nt, Artificial Sequence
  Synthetic
caaugucuuucuucggcucag

SEQ ID NO: 11845 - RNA, 21 nt, Artificial Sequence
  Synthetic
cagcuccauccauagaugaaa

SEQ ID NO: 11846 - RNA, 21 nt, Artificial Sequence
  Synthetic
caucuauggauggagcugagc

SEQ ID NO: 11847 - RNA, 21 nt, Artificial Sequence
  Synthetic
ccauccauagaugaaacacgg

SEQ ID NO: 11848 - RNA, 21 nt, Artificial Sequence
  Synthetic
cccguguuucaucuauggaug

SEQ ID NO: 11849 - RNA, 21 nt, Artificial Sequence
  Synthetic
ccguguuucaucuauggaugg

SEQ ID NO: 11850 - RNA, 21 nt, Artificial Sequence
  Synthetic
cgcccguguuucaucuaugga

SEQ ID NO: 11851 - RNA, 21 nt, Artificial Sequence
  Synthetic
cggcucagcuccauccauaga

SEQ ID NO: 11852 - RNA, 21 nt, Artificial Sequence
  Synthetic
cguguuucaucuauggaugga

SEQ ID NO: 11853 - RNA, 21 nt, Artificial Sequence
  Synthetic
cuauggauggagcugagccga

SEQ ID NO: 11854 - RNA, 21 nt, Artificial Sequence
  Synthetic
cucagcuccauccauagauga

SEQ ID NO: 11855 - RNA, 21 nt, Artificial Sequence
  Synthetic
cuccauccauagaugaaacac

SEQ ID NO: 11856 - RNA, 21 nt, Artificial Sequence
  Synthetic
cuucggcucagcuccauccau

SEQ ID NO: 11857 - RNA, 21 nt, Artificial Sequence
  Synthetic
cuuucuucggcucagcuccau

SEQ ID NO: 11858 - RNA, 21 nt, Artificial Sequence
  Synthetic
gauggagcugagccgaagaaa

SEQ ID NO: 11859 - RNA, 21 nt, Artificial Sequence
  Synthetic
gcccguguuucaucuauggau

SEQ ID NO: 11860 - RNA, 21 nt, Artificial Sequence
  Synthetic
gcgcccguguuucaucuaugg

SEQ ID NO: 11861 - RNA, 21 nt, Artificial Sequence
  Synthetic
gcucagcuccauccauagaug

SEQ ID NO: 11862 - RNA, 21 nt, Artificial Sequence
  Synthetic
gcuccauccauagaugaaaca

SEQ ID NO: 11863 - RNA, 21 nt, Artificial Sequence
  Synthetic
ggauggagcugagccgaagaa

SEQ ID NO: 11864 - RNA, 21 nt, Artificial Sequence
  Synthetic
ggcucagcuccauccauagau

SEQ ID NO: 11865 - RNA, 21 nt, Artificial Sequence
  Synthetic
gucuuucuucggcucagcucc

SEQ ID NO: 11866 - RNA, 21 nt, Artificial Sequence
  Synthetic
guguuucaucuauggauggag

SEQ ID NO: 11867 - RNA, 21 nt, Artificial Sequence
  Synthetic
guuucaucuauggauggagcu

SEQ ID NO: 11868 - RNA, 21 nt, Artificial Sequence
  Synthetic
uauggauggagcugagccgaa

SEQ ID NO: 11869 - RNA, 21 nt, Artificial Sequence
  Synthetic
ucagcuccauccauagaugaa

SEQ ID NO: 11870 - RNA, 21 nt, Artificial Sequence
  Synthetic
ucaucuauggauggagcugag

SEQ ID NO: 11871 - RNA, 21 nt, Artificial Sequence
  Synthetic
uccauccauagaugaaacacg

SEQ ID NO: 11872 - RNA, 21 nt, Artificial Sequence
  Synthetic
ucggcucagcuccauccauag

SEQ ID NO: 11873 - RNA, 21 nt, Artificial Sequence
  Synthetic
ucuauggauggagcugagccg

SEQ ID NO: 11874 - RNA, 21 nt, Artificial Sequence
  Synthetic
ucuucggcucagcuccaucca

SEQ ID NO: 11875 - RNA, 21 nt, Artificial Sequence
  Synthetic
ucuuucuucggcucagcucca

SEQ ID NO: 11876 - RNA, 21 nt, Artificial Sequence
  Synthetic
ugcgcccguguuucaucuaug

SEQ ID NO: 11877 - RNA, 21 nt, Artificial Sequence
  Synthetic
uggagcugagccgaagaaaga

SEQ ID NO: 11878 - RNA, 21 nt, Artificial Sequence
  Synthetic
uggauggagcugagccgaaga

SEQ ID NO: 11879 - RNA, 21 nt, Artificial Sequence
  Synthetic
ugucuuucuucggcucagcuc

SEQ ID NO: 11880 - RNA, 21 nt, Artificial Sequence
  Synthetic
uguuucaucuauggauggagc

SEQ ID NO: 11881 - RNA, 21 nt, Artificial Sequence
  Synthetic
uucaucuauggauggagcuga

SEQ ID NO: 11882 - RNA, 21 nt, Artificial Sequence
  Synthetic
uucggcucagcuccauccaua

SEQ ID NO: 11883 - RNA, 21 nt, Artificial Sequence
  Synthetic
uucuucggcucagcuccaucc

SEQ ID NO: 11884 - RNA, 21 nt, Artificial Sequence
  Synthetic
uuucaucuauggauggagcug

SEQ ID NO: 11885 - RNA, 21 nt, Artificial Sequence
  Synthetic
uuucuucggcucagcuccauc

SEQ ID NO: 11886 - RNA, 22 nt, Artificial Sequence
  Synthetic
aaugucuuucuucggcucagcu

SEQ ID NO: 11887 - RNA, 22 nt, Artificial Sequence
  Synthetic
agcuccauccauagaugaaaca

SEQ ID NO: 11888 - RNA, 22 nt, Artificial Sequence
  Synthetic
aucuauggauggagcugagccg

SEQ ID NO: 11889 - RNA, 22 nt, Artificial Sequence
  Synthetic
augcgcccguguuucaucuaug

SEQ ID NO: 11890 - RNA, 22 nt, Artificial Sequence
  Synthetic
auggagcugagccgaagaaaga

SEQ ID NO: 11891 - RNA, 22 nt, Artificial Sequence
  Synthetic
auggauggagcugagccgaaga

SEQ ID NO: 11892 - RNA, 22 nt, Artificial Sequence
  Synthetic
augucuuucuucggcucagcuc

SEQ ID NO: 11893 - RNA, 22 nt, Artificial Sequence
  Synthetic
caaugucuuucuucggcucagc

SEQ ID NO: 11894 - RNA, 22 nt, Artificial Sequence
  Synthetic
cagcuccauccauagaugaaac

SEQ ID NO: 11895 - RNA, 22 nt, Artificial Sequence
  Synthetic
caucuauggauggagcugagcc

SEQ ID NO: 11896 - RNA, 22 nt, Artificial Sequence
  Synthetic
ccauccauagaugaaacacggg

SEQ ID NO: 11897 - RNA, 22 nt, Artificial Sequence
  Synthetic
cccguguuucaucuauggaugg

SEQ ID NO: 11898 - RNA, 22 nt, Artificial Sequence
  Synthetic
ccguguuucaucuauggaugga

SEQ ID NO: 11899 - RNA, 22 nt, Artificial Sequence
  Synthetic
cgcccguguuucaucuauggau

SEQ ID NO: 11900 - RNA, 22 nt, Artificial Sequence
  Synthetic
cggcucagcuccauccauagau

SEQ ID NO: 11901 - RNA, 22 nt, Artificial Sequence
  Synthetic
cguguuucaucuauggauggag

SEQ ID NO: 11902 - RNA, 22 nt, Artificial Sequence
  Synthetic
cuauggauggagcugagccgaa

SEQ ID NO: 11903 - RNA, 22 nt, Artificial Sequence
  Synthetic
cucagcuccauccauagaugaa

SEQ ID NO: 11904 - RNA, 22 nt, Artificial Sequence
  Synthetic
cuccauccauagaugaaacacg

SEQ ID NO: 11905 - RNA, 22 nt, Artificial Sequence
  Synthetic
cuucggcucagcuccauccaua

SEQ ID NO: 11906 - RNA, 22 nt, Artificial Sequence
  Synthetic
cuuucuucggcucagcuccauc

SEQ ID NO: 11907 - RNA, 22 nt, Artificial Sequence
  Synthetic
gauggagcugagccgaagaaag

SEQ ID NO: 11908 - RNA, 22 nt, Artificial Sequence
  Synthetic
gcaaugucuuucuucggcucag

SEQ ID NO: 11909 - RNA, 22 nt, Artificial Sequence
  Synthetic
gcccguguuucaucuauggaug

SEQ ID NO: 11910 - RNA, 22 nt, Artificial Sequence
  Synthetic
gcgcccguguuucaucuaugga

SEQ ID NO: 11911 - RNA, 22 nt, Artificial Sequence
  Synthetic
gcucagcuccauccauagauga

SEQ ID NO: 11912 - RNA, 22 nt, Artificial Sequence
  Synthetic
gcuccauccauagaugaaacac

SEQ ID NO: 11913 - RNA, 22 nt, Artificial Sequence
  Synthetic
ggauggagcugagccgaagaaa

SEQ ID NO: 11914 - RNA, 22 nt, Artificial Sequence
  Synthetic
ggcucagcuccauccauagaug

SEQ ID NO: 11915 - RNA, 22 nt, Artificial Sequence
  Synthetic
gucuuucuucggcucagcucca

SEQ ID NO: 11916 - RNA, 22 nt, Artificial Sequence
  Synthetic
guguuucaucuauggauggagc

SEQ ID NO: 11917 - RNA, 22 nt, Artificial Sequence
  Synthetic
guuucaucuauggauggagcug

SEQ ID NO: 11918 - RNA, 22 nt, Artificial Sequence
  Synthetic
uauggauggagcugagccgaag

SEQ ID NO: 11919 - RNA, 22 nt, Artificial Sequence
  Synthetic
ucagcuccauccauagaugaaa

SEQ ID NO: 11920 - RNA, 22 nt, Artificial Sequence
  Synthetic
ucaucuauggauggagcugagc

SEQ ID NO: 11921 - RNA, 22 nt, Artificial Sequence
  Synthetic
uccauccauagaugaaacacgg

SEQ ID NO: 11922 - RNA, 22 nt, Artificial Sequence
  Synthetic
ucggcucagcuccauccauaga

SEQ ID NO: 11923 - RNA, 22 nt, Artificial Sequence
  Synthetic
ucuauggauggagcugagccga

SEQ ID NO: 11924 - RNA, 22 nt, Artificial Sequence
  Synthetic
ucuucggcucagcuccauccau

SEQ ID NO: 11925 - RNA, 22 nt, Artificial Sequence
  Synthetic
ucuuucuucggcucagcuccau

SEQ ID NO: 11926 - RNA, 22 nt, Artificial Sequence
  Synthetic
ugcgcccguguuucaucuaugg

SEQ ID NO: 11927 - RNA, 22 nt, Artificial Sequence
  Synthetic
uggagcugagccgaagaaagac

SEQ ID NO: 11928 - RNA, 22 nt, Artificial Sequence
  Synthetic
uggauggagcugagccgaagaa

SEQ ID NO: 11929 - RNA, 22 nt, Artificial Sequence
  Synthetic
ugucuuucuucggcucagcucc

SEQ ID NO: 11930 - RNA, 22 nt, Artificial Sequence
  Synthetic
uguuucaucuauggauggagcu

SEQ ID NO: 11931 - RNA, 22 nt, Artificial Sequence
  Synthetic
uucaucuauggauggagcugag

SEQ ID NO: 11932 - RNA, 22 nt, Artificial Sequence
  Synthetic
uucggcucagcuccauccauag

SEQ ID NO: 11933 - RNA, 22 nt, Artificial Sequence
  Synthetic
uucuucggcucagcuccaucca

SEQ ID NO: 11934 - RNA, 22 nt, Artificial Sequence
  Synthetic
uuucaucuauggauggagcuga

SEQ ID NO: 11935 - RNA, 22 nt, Artificial Sequence
  Synthetic
uuucuucggcucagcuccaucc

SEQ ID NO: 11936 - RNA, 20 nt, Artificial Sequence
  Synthetic
aaugucuuucuucggcucau

SEQ ID NO: 11937 - RNA, 20 nt, Artificial Sequence
  Synthetic
agagaugagccgaagaaaga

SEQ ID NO: 11938 - RNA, 20 nt, Artificial Sequence
  Synthetic
agaugagccgaagaaagaca

SEQ ID NO: 11939 - RNA, 20 nt, Artificial Sequence
  Synthetic
auagagaugagccgaagaaa

SEQ ID NO: 11940 - RNA, 20 nt, Artificial Sequence
  Synthetic
aucuauggauagagaugagc

SEQ ID NO: 11941 - RNA, 20 nt, Artificial Sequence
  Synthetic
aucucuauccauagaugaaa

SEQ ID NO: 11942 - RNA, 20 nt, Artificial Sequence
  Synthetic
auggauagagaugagccgaa

SEQ ID NO: 11943 - RNA, 20 nt, Artificial Sequence
  Synthetic
augucuuucuucggcucauc

SEQ ID NO: 11944 - RNA, 20 nt, Artificial Sequence
  Synthetic
caaugucuuucuucggcuca

SEQ ID NO: 11945 - RNA, 20 nt, Artificial Sequence
  Synthetic
caucuauggauagagaugag

SEQ ID NO: 11946 - RNA, 20 nt, Artificial Sequence
  Synthetic
caucucuauccauagaugaa

SEQ ID NO: 11947 - RNA, 20 nt, Artificial Sequence
  Synthetic
ccguguuucaucuauggaua

SEQ ID NO: 11948 - RNA, 20 nt, Artificial Sequence
  Synthetic
cggcucaucucuauccauag

SEQ ID NO: 11949 - RNA, 20 nt, Artificial Sequence
  Synthetic
cguguuucaucuauggauag

SEQ ID NO: 11950 - RNA, 20 nt, Artificial Sequence
  Synthetic
cuauggauagagaugagccg

SEQ ID NO: 11951 - RNA, 20 nt, Artificial Sequence
  Synthetic
cucaucucuauccauagaug

SEQ ID NO: 11952 - RNA, 20 nt, Artificial Sequence
  Synthetic
cuucggcucaucucuaucca

SEQ ID NO: 11953 - RNA, 20 nt, Artificial Sequence
  Synthetic
cuuucuucggcucaucucua

SEQ ID NO: 11954 - RNA, 20 nt, Artificial Sequence
  Synthetic
gagaugagccgaagaaagac

SEQ ID NO: 11955 - RNA, 20 nt, Artificial Sequence
  Synthetic
gauagagaugagccgaagaa

SEQ ID NO: 11956 - RNA, 20 nt, Artificial Sequence
  Synthetic
gaugagccgaagaaagacau

SEQ ID NO: 11957 - RNA, 20 nt, Artificial Sequence
  Synthetic
gcaaugucuuucuucggcuc

SEQ ID NO: 11958 - RNA, 20 nt, Artificial Sequence
  Synthetic
gcucaucucuauccauagau

SEQ ID NO: 11959 - RNA, 20 nt, Artificial Sequence
  Synthetic
ggauagagaugagccgaaga

SEQ ID NO: 11960 - RNA, 20 nt, Artificial Sequence
  Synthetic
ggcaaugucuuucuucggcu

SEQ ID NO: 11961 - RNA, 20 nt, Artificial Sequence
  Synthetic
ggcucaucucuauccauaga

SEQ ID NO: 11962 - RNA, 20 nt, Artificial Sequence
  Synthetic
gucuuucuucggcucaucuc

SEQ ID NO: 11963 - RNA, 20 nt, Artificial Sequence
  Synthetic
guguuucaucuauggauaga

SEQ ID NO: 11964 - RNA, 20 nt, Artificial Sequence
  Synthetic
guuucaucuauggauagaga

SEQ ID NO: 11965 - RNA, 20 nt, Artificial Sequence
  Synthetic
uagagaugagccgaagaaag

SEQ ID NO: 11966 - RNA, 20 nt, Artificial Sequence
  Synthetic
uauggauagagaugagccga

SEQ ID NO: 11967 - RNA, 20 nt, Artificial Sequence
  Synthetic
ucaucuauggauagagauga

SEQ ID NO: 11968 - RNA, 20 nt, Artificial Sequence
  Synthetic
ucaucucuauccauagauga

SEQ ID NO: 11969 - RNA, 20 nt, Artificial Sequence
  Synthetic
ucggcucaucucuauccaua

SEQ ID NO: 11970 - RNA, 20 nt, Artificial Sequence
  Synthetic
ucuauggauagagaugagcc

SEQ ID NO: 11971 - RNA, 20 nt, Artificial Sequence
  Synthetic
ucuucggcucaucucuaucc

SEQ ID NO: 11972 - RNA, 20 nt, Artificial Sequence
  Synthetic
ucuuucuucggcucaucucu

SEQ ID NO: 11973 - RNA, 20 nt, Artificial Sequence
  Synthetic
uggauagagaugagccgaag

SEQ ID NO: 11974 - RNA, 20 nt, Artificial Sequence
  Synthetic
uggcaaugucuuucuucggc

SEQ ID NO: 11975 - RNA, 20 nt, Artificial Sequence
  Synthetic
ugucuuucuucggcucaucu

SEQ ID NO: 11976 - RNA, 20 nt, Artificial Sequence
  Synthetic
uguuucaucuauggauagag

SEQ ID NO: 11977 - RNA, 20 nt, Artificial Sequence
  Synthetic
uucaucuauggauagagaug

SEQ ID NO: 11978 - RNA, 20 nt, Artificial Sequence
  Synthetic
uucggcucaucucuauccau

SEQ ID NO: 11979 - RNA, 20 nt, Artificial Sequence
  Synthetic
uucuucggcucaucucuauc

SEQ ID NO: 11980 - RNA, 20 nt, Artificial Sequence
  Synthetic
uuucaucuauggauagagau

SEQ ID NO: 11981 - RNA, 20 nt, Artificial Sequence
  Synthetic
uuucuucggcucaucucuau

SEQ ID NO: 11982 - RNA, 21 nt, Artificial Sequence
  Synthetic
aaugucuuucuucggcucauc

SEQ ID NO: 11983 - RNA, 21 nt, Artificial Sequence
  Synthetic
agagaugagccgaagaaagac

SEQ ID NO: 11984 - RNA, 21 nt, Artificial Sequence
  Synthetic
agaugagccgaagaaagacau

SEQ ID NO: 11985 - RNA, 21 nt, Artificial Sequence
  Synthetic
auagagaugagccgaagaaag

SEQ ID NO: 11986 - RNA, 21 nt, Artificial Sequence
  Synthetic
aucuauggauagagaugagcc

SEQ ID NO: 11987 - RNA, 21 nt, Artificial Sequence
  Synthetic
aucucuauccauagaugaaac

SEQ ID NO: 11988 - RNA, 21 nt, Artificial Sequence
  Synthetic
auggauagagaugagccgaag

SEQ ID NO: 11989 - RNA, 21 nt, Artificial Sequence
  Synthetic
augucuuucuucggcucaucu

SEQ ID NO: 11990 - RNA, 21 nt, Artificial Sequence
  Synthetic
caaugucuuucuucggcucau

SEQ ID NO: 11991 - RNA, 21 nt, Artificial Sequence
  Synthetic
caucuauggauagagaugagc

SEQ ID NO: 11992 - RNA, 21 nt, Artificial Sequence
  Synthetic
caucucuauccauagaugaaa

SEQ ID NO: 11993 - RNA, 21 nt, Artificial Sequence
  Synthetic
cccguguuucaucuauggaua

SEQ ID NO: 11994 - RNA, 21 nt, Artificial Sequence
  Synthetic
ccguguuucaucuauggauag

SEQ ID NO: 11995 - RNA, 21 nt, Artificial Sequence
  Synthetic
cggcucaucucuauccauaga

SEQ ID NO: 11996 - RNA, 21 nt, Artificial Sequence
  Synthetic
cguguuucaucuauggauaga

SEQ ID NO: 11997 - RNA, 21 nt, Artificial Sequence
  Synthetic
cuauggauagagaugagccga

SEQ ID NO: 11998 - RNA, 21 nt, Artificial Sequence
  Synthetic
cucaucucuauccauagauga

SEQ ID NO: 11999 - RNA, 21 nt, Artificial Sequence
  Synthetic
cuucggcucaucucuauccau

SEQ ID NO: 12000 - RNA, 21 nt, Artificial Sequence
  Synthetic
cuuucuucggcucaucucuau

SEQ ID NO: 12001 - RNA, 21 nt, Artificial Sequence
  Synthetic
gagaugagccgaagaaagaca

SEQ ID NO: 12002 - RNA, 21 nt, Artificial Sequence
  Synthetic
gauagagaugagccgaagaaa

SEQ ID NO: 12003 - RNA, 21 nt, Artificial Sequence
  Synthetic
gaugagccgaagaaagacauu

SEQ ID NO: 12004 - RNA, 21 nt, Artificial Sequence
  Synthetic
gcaaugucuuucuucggcuca

SEQ ID NO: 12005 - RNA, 21 nt, Artificial Sequence
  Synthetic
gcucaucucuauccauagaug

SEQ ID NO: 12006 - RNA, 21 nt, Artificial Sequence
  Synthetic
ggauagagaugagccgaagaa

SEQ ID NO: 12007 - RNA, 21 nt, Artificial Sequence
  Synthetic
ggcaaugucuuucuucggcuc

SEQ ID NO: 12008 - RNA, 21 nt, Artificial Sequence
  Synthetic
ggcucaucucuauccauagau

SEQ ID NO: 12009 - RNA, 21 nt, Artificial Sequence
  Synthetic
gucuuucuucggcucaucucu

SEQ ID NO: 12010 - RNA, 21 nt, Artificial Sequence
  Synthetic
guggcaaugucuuucuucggc

SEQ ID NO: 12011 - RNA, 21 nt, Artificial Sequence
  Synthetic
guguuucaucuauggauagag

SEQ ID NO: 12012 - RNA, 21 nt, Artificial Sequence
  Synthetic
guuucaucuauggauagagau

SEQ ID NO: 12013 - RNA, 21 nt, Artificial Sequence
  Synthetic
uagagaugagccgaagaaaga

SEQ ID NO: 12014 - RNA, 21 nt, Artificial Sequence
  Synthetic
uauggauagagaugagccgaa

SEQ ID NO: 12015 - RNA, 21 nt, Artificial Sequence
  Synthetic
ucaucuauggauagagaugag

SEQ ID NO: 12016 - RNA, 21 nt, Artificial Sequence
  Synthetic
ucaucucuauccauagaugaa

SEQ ID NO: 12017 - RNA, 21 nt, Artificial Sequence
  Synthetic
ucggcucaucucuauccauag

SEQ ID NO: 12018 - RNA, 21 nt, Artificial Sequence
  Synthetic
ucuauggauagagaugagccg

SEQ ID NO: 12019 - RNA, 21 nt, Artificial Sequence
  Synthetic
ucuucggcucaucucuaucca

SEQ ID NO: 12020 - RNA, 21 nt, Artificial Sequence
  Synthetic
ucuuucuucggcucaucucua

SEQ ID NO: 12021 - RNA, 21 nt, Artificial Sequence
  Synthetic
uggauagagaugagccgaaga

SEQ ID NO: 12022 - RNA, 21 nt, Artificial Sequence
  Synthetic
uggcaaugucuuucuucggcu

SEQ ID NO: 12023 - RNA, 21 nt, Artificial Sequence
  Synthetic
ugucuuucuucggcucaucuc

SEQ ID NO: 12024 - RNA, 21 nt, Artificial Sequence
  Synthetic
uguuucaucuauggauagaga

SEQ ID NO: 12025 - RNA, 21 nt, Artificial Sequence
  Synthetic
uucaucuauggauagagauga

SEQ ID NO: 12026 - RNA, 21 nt, Artificial Sequence
  Synthetic
uucggcucaucucuauccaua

SEQ ID NO: 12027 - RNA, 21 nt, Artificial Sequence
  Synthetic
uucuucggcucaucucuaucc

SEQ ID NO: 12028 - RNA, 21 nt, Artificial Sequence
  Synthetic
uuucaucuauggauagagaug

SEQ ID NO: 12029 - RNA, 21 nt, Artificial Sequence
  Synthetic
uuucuucggcucaucucuauc

SEQ ID NO: 12030 - RNA, 22 nt, Artificial Sequence
  Synthetic
aaugucuuucuucggcucaucu

SEQ ID NO: 12031 - RNA, 22 nt, Artificial Sequence
  Synthetic
agagaugagccgaagaaagaca

SEQ ID NO: 12032 - RNA, 22 nt, Artificial Sequence
  Synthetic
agaugagccgaagaaagacauu

SEQ ID NO: 12033 - RNA, 22 nt, Artificial Sequence
  Synthetic
auagagaugagccgaagaaaga

SEQ ID NO: 12034 - RNA, 22 nt, Artificial Sequence
  Synthetic
aucuauggauagagaugagccg

SEQ ID NO: 12035 - RNA, 22 nt, Artificial Sequence
  Synthetic
aucucuauccauagaugaaaca

SEQ ID NO: 12036 - RNA, 22 nt, Artificial Sequence
  Synthetic
auggauagagaugagccgaaga

SEQ ID NO: 12037 - RNA, 22 nt, Artificial Sequence
  Synthetic
augucuuucuucggcucaucuc

SEQ ID NO: 12038 - RNA, 22 nt, Artificial Sequence
  Synthetic
caaugucuuucuucggcucauc

SEQ ID NO: 12039 - RNA, 22 nt, Artificial Sequence
  Synthetic
caucuauggauagagaugagcc

SEQ ID NO: 12040 - RNA, 22 nt, Artificial Sequence
  Synthetic
caucucuauccauagaugaaac

SEQ ID NO: 12041 - RNA, 22 nt, Artificial Sequence
  Synthetic
cccguguuucaucuauggauag

SEQ ID NO: 12042 - RNA, 22 nt, Artificial Sequence
  Synthetic
ccguguuucaucuauggauaga

SEQ ID NO: 12043 - RNA, 22 nt, Artificial Sequence
  Synthetic
cggcucaucucuauccauagau

SEQ ID NO: 12044 - RNA, 22 nt, Artificial Sequence
  Synthetic
cguguuucaucuauggauagag

SEQ ID NO: 12045 - RNA, 22 nt, Artificial Sequence
  Synthetic
cuauggauagagaugagccgaa

SEQ ID NO: 12046 - RNA, 22 nt, Artificial Sequence
  Synthetic
cucaucucuauccauagaugaa

SEQ ID NO: 12047 - RNA, 22 nt, Artificial Sequence
  Synthetic
cuucggcucaucucuauccaua

SEQ ID NO: 12048 - RNA, 22 nt, Artificial Sequence
  Synthetic
cuuucuucggcucaucucuauc

SEQ ID NO: 12049 - RNA, 22 nt, Artificial Sequence
  Synthetic
gagaugagccgaagaaagacau

SEQ ID NO: 12050 - RNA, 22 nt, Artificial Sequence
  Synthetic
gauagagaugagccgaagaaag

SEQ ID NO: 12051 - RNA, 22 nt, Artificial Sequence
  Synthetic
gaugagccgaagaaagacauug

SEQ ID NO: 12052 - RNA, 22 nt, Artificial Sequence
  Synthetic
gcaaugucuuucuucggcucau

SEQ ID NO: 12053 - RNA, 22 nt, Artificial Sequence
  Synthetic
gcccguguuucaucuauggaua

SEQ ID NO: 12054 - RNA, 22 nt, Artificial Sequence
  Synthetic
gcucaucucuauccauagauga

SEQ ID NO: 12055 - RNA, 22 nt, Artificial Sequence
  Synthetic
ggauagagaugagccgaagaaa

SEQ ID NO: 12056 - RNA, 22 nt, Artificial Sequence
  Synthetic
ggcaaugucuuucuucggcuca

SEQ ID NO: 12057 - RNA, 22 nt, Artificial Sequence
  Synthetic
ggcucaucucuauccauagaug

SEQ ID NO: 12058 - RNA, 22 nt, Artificial Sequence
  Synthetic
gucuuucuucggcucaucucua

SEQ ID NO: 12059 - RNA, 22 nt, Artificial Sequence
  Synthetic
guggcaaugucuuucuucggcu

SEQ ID NO: 12060 - RNA, 22 nt, Artificial Sequence
  Synthetic
guguuucaucuauggauagaga

SEQ ID NO: 12061 - RNA, 22 nt, Artificial Sequence
  Synthetic
guuucaucuauggauagagaug

SEQ ID NO: 12062 - RNA, 22 nt, Artificial Sequence
  Synthetic
uagagaugagccgaagaaagac

SEQ ID NO: 12063 - RNA, 22 nt, Artificial Sequence
  Synthetic
uauggauagagaugagccgaag

SEQ ID NO: 12064 - RNA, 22 nt, Artificial Sequence
  Synthetic
ucaucuauggauagagaugagc

SEQ ID NO: 12065 - RNA, 22 nt, Artificial Sequence
  Synthetic
ucaucucuauccauagaugaaa

SEQ ID NO: 12066 - RNA, 22 nt, Artificial Sequence
  Synthetic
ucggcucaucucuauccauaga

SEQ ID NO: 12067 - RNA, 22 nt, Artificial Sequence
  Synthetic
ucuauggauagagaugagccga

SEQ ID NO: 12068 - RNA, 22 nt, Artificial Sequence
  Synthetic
ucuucggcucaucucuauccau

SEQ ID NO: 12069 - RNA, 22 nt, Artificial Sequence
  Synthetic
ucuuucuucggcucaucucuau

SEQ ID NO: 12070 - RNA, 22 nt, Artificial Sequence
  Synthetic
uggauagagaugagccgaagaa

SEQ ID NO: 12071 - RNA, 22 nt, Artificial Sequence
  Synthetic
uggcaaugucuuucuucggcuc

SEQ ID NO: 12072 - RNA, 22 nt, Artificial Sequence
  Synthetic
ugucuuucuucggcucaucucu

SEQ ID NO: 12073 - RNA, 22 nt, Artificial Sequence
  Synthetic
uguggcaaugucuuucuucggc

SEQ ID NO: 12074 - RNA, 22 nt, Artificial Sequence
  Synthetic
uguuucaucuauggauagagau

SEQ ID NO: 12075 - RNA, 22 nt, Artificial Sequence
  Synthetic
uucaucuauggauagagaugag

SEQ ID NO: 12076 - RNA, 22 nt, Artificial Sequence
  Synthetic
uucggcucaucucuauccauag

SEQ ID NO: 12077 - RNA, 22 nt, Artificial Sequence
  Synthetic
uucuucggcucaucucuaucca

SEQ ID NO: 12078 - RNA, 22 nt, Artificial Sequence
  Synthetic
uuucaucuauggauagagauga

SEQ ID NO: 12079 - RNA, 22 nt, Artificial Sequence
  Synthetic
uuucuucggcucaucucuaucc

SEQ ID NO: 12080 - RNA, 20 nt, Artificial Sequence
  Synthetic
aaugucuuucuucugcucag

SEQ ID NO: 12081 - RNA, 20 nt, Artificial Sequence
  Synthetic
agagcugagcagaagaaaga

SEQ ID NO: 12082 - RNA, 20 nt, Artificial Sequence
  Synthetic
agcagaagaaagacauugcc

SEQ ID NO: 12083 - RNA, 20 nt, Artificial Sequence
  Synthetic
agcugagcagaagaaagaca

SEQ ID NO: 12084 - RNA, 20 nt, Artificial Sequence
  Synthetic
auagagcugagcagaagaaa

SEQ ID NO: 12085 - RNA, 20 nt, Artificial Sequence
  Synthetic
aucuauggauagagcugagc

SEQ ID NO: 12086 - RNA, 20 nt, Artificial Sequence
  Synthetic
auggauagagcugagcagaa

SEQ ID NO: 12087 - RNA, 20 nt, Artificial Sequence
  Synthetic
augucuuucuucugcucagc

SEQ ID NO: 12088 - RNA, 20 nt, Artificial Sequence
  Synthetic
caaugucuuucuucugcuca

SEQ ID NO: 12089 - RNA, 20 nt, Artificial Sequence
  Synthetic
cagaagaaagacauugccac

SEQ ID NO: 12090 - RNA, 20 nt, Artificial Sequence
  Synthetic
caucuauggauagagcugag

SEQ ID NO: 12091 - RNA, 20 nt, Artificial Sequence
  Synthetic
cuauggauagagcugagcag

SEQ ID NO: 12092 - RNA, 20 nt, Artificial Sequence
  Synthetic
cugagcagaagaaagacauu

SEQ ID NO: 12093 - RNA, 20 nt, Artificial Sequence
  Synthetic
cugcucagcucuauccauag

SEQ ID NO: 12094 - RNA, 20 nt, Artificial Sequence
  Synthetic
cuguggcaaugucuuucuuc

SEQ ID NO: 12095 - RNA, 20 nt, Artificial Sequence
  Synthetic
cuucugcucagcucuaucca

SEQ ID NO: 12096 - RNA, 20 nt, Artificial Sequence
  Synthetic
cuuucuucugcucagcucua

SEQ ID NO: 12097 - RNA, 20 nt, Artificial Sequence
  Synthetic
gagcagaagaaagacauugc

SEQ ID NO: 12098 - RNA, 20 nt, Artificial Sequence
  Synthetic
gagcugagcagaagaaagac

SEQ ID NO: 12099 - RNA, 20 nt, Artificial Sequence
  Synthetic
gauagagcugagcagaagaa

SEQ ID NO: 12100 - RNA, 20 nt, Artificial Sequence
  Synthetic
gcaaugucuuucuucugcuc

SEQ ID NO: 12101 - RNA, 20 nt, Artificial Sequence
  Synthetic
gcagaagaaagacauugcca

SEQ ID NO: 12102 - RNA, 20 nt, Artificial Sequence
  Synthetic
gcugagcagaagaaagacau

SEQ ID NO: 12103 - RNA, 20 nt, Artificial Sequence
  Synthetic
gcuguggcaaugucuuucuu

SEQ ID NO: 12104 - RNA, 20 nt, Artificial Sequence
  Synthetic
ggauagagcugagcagaaga

SEQ ID NO: 12105 - RNA, 20 nt, Artificial Sequence
  Synthetic
ggcaaugucuuucuucugcu

SEQ ID NO: 12106 - RNA, 20 nt, Artificial Sequence
  Synthetic
ggcuguggcaaugucuuucu

SEQ ID NO: 12107 - RNA, 20 nt, Artificial Sequence
  Synthetic
gucuuucuucugcucagcuc

SEQ ID NO: 12108 - RNA, 20 nt, Artificial Sequence
  Synthetic
guggcaaugucuuucuucug

SEQ ID NO: 12109 - RNA, 20 nt, Artificial Sequence
  Synthetic
uagagcugagcagaagaaag

SEQ ID NO: 12110 - RNA, 20 nt, Artificial Sequence
  Synthetic
uauggauagagcugagcaga

SEQ ID NO: 12111 - RNA, 20 nt, Artificial Sequence
  Synthetic
ucaucuauggauagagcuga

SEQ ID NO: 12112 - RNA, 20 nt, Artificial Sequence
  Synthetic
ucuauggauagagcugagca

SEQ ID NO: 12113 - RNA, 20 nt, Artificial Sequence
  Synthetic
ucugcucagcucuauccaua

SEQ ID NO: 12114 - RNA, 20 nt, Artificial Sequence
  Synthetic
ucuucugcucagcucuaucc

SEQ ID NO: 12115 - RNA, 20 nt, Artificial Sequence
  Synthetic
ucuuucuucugcucagcucu

SEQ ID NO: 12116 - RNA, 20 nt, Artificial Sequence
  Synthetic
ugagcagaagaaagacauug

SEQ ID NO: 12117 - RNA, 20 nt, Artificial Sequence
  Synthetic
uggauagagcugagcagaag

SEQ ID NO: 12118 - RNA, 20 nt, Artificial Sequence
  Synthetic
uggcaaugucuuucuucugc

SEQ ID NO: 12119 - RNA, 20 nt, Artificial Sequence
  Synthetic
uggcuguggcaaugucuuuc

SEQ ID NO: 12120 - RNA, 20 nt, Artificial Sequence
  Synthetic
ugucuuucuucugcucagcu

SEQ ID NO: 12121 - RNA, 20 nt, Artificial Sequence
  Synthetic
uguggcaaugucuuucuucu

SEQ ID NO: 12122 - RNA, 20 nt, Artificial Sequence
  Synthetic
uucaucuauggauagagcug

SEQ ID NO: 12123 - RNA, 20 nt, Artificial Sequence
  Synthetic
uucugcucagcucuauccau

SEQ ID NO: 12124 - RNA, 20 nt, Artificial Sequence
  Synthetic
uucuucugcucagcucuauc

SEQ ID NO: 12125 - RNA, 20 nt, Artificial Sequence
  Synthetic
uuucuucugcucagcucuau

SEQ ID NO: 12126 - RNA, 21 nt, Artificial Sequence
  Synthetic
aaugucuuucuucugcucagc

SEQ ID NO: 12127 - RNA, 21 nt, Artificial Sequence
  Synthetic
agagcugagcagaagaaagac

SEQ ID NO: 12128 - RNA, 21 nt, Artificial Sequence
  Synthetic
agcagaagaaagacauugcca

SEQ ID NO: 12129 - RNA, 21 nt, Artificial Sequence
  Synthetic
agcugagcagaagaaagacau

SEQ ID NO: 12130 - RNA, 21 nt, Artificial Sequence
  Synthetic
auagagcugagcagaagaaag

SEQ ID NO: 12131 - RNA, 21 nt, Artificial Sequence
  Synthetic
aucuauggauagagcugagca

SEQ ID NO: 12132 - RNA, 21 nt, Artificial Sequence
  Synthetic
auggauagagcugagcagaag

SEQ ID NO: 12133 - RNA, 21 nt, Artificial Sequence
  Synthetic
augucuuucuucugcucagcu

SEQ ID NO: 12134 - RNA, 21 nt, Artificial Sequence
  Synthetic
caaugucuuucuucugcucag

SEQ ID NO: 12135 - RNA, 21 nt, Artificial Sequence
  Synthetic
cagaagaaagacauugccaca

SEQ ID NO: 12136 - RNA, 21 nt, Artificial Sequence
  Synthetic
caucuauggauagagcugagc

SEQ ID NO: 12137 - RNA, 21 nt, Artificial Sequence
  Synthetic
cuauggauagagcugagcaga

SEQ ID NO: 12138 - RNA, 21 nt, Artificial Sequence
  Synthetic
cugagcagaagaaagacauug

SEQ ID NO: 12139 - RNA, 21 nt, Artificial Sequence
  Synthetic
cugcucagcucuauccauaga

SEQ ID NO: 12140 - RNA, 21 nt, Artificial Sequence
  Synthetic
cuguggcaaugucuuucuucu

SEQ ID NO: 12141 - RNA, 21 nt, Artificial Sequence
  Synthetic
cuucugcucagcucuauccau

SEQ ID NO: 12142 - RNA, 21 nt, Artificial Sequence
  Synthetic
cuuucuucugcucagcucuau

SEQ ID NO: 12143 - RNA, 21 nt, Artificial Sequence
  Synthetic
gagcagaagaaagacauugcc

SEQ ID NO: 12144 - RNA, 21 nt, Artificial Sequence
  Synthetic
gagcugagcagaagaaagaca

SEQ ID NO: 12145 - RNA, 21 nt, Artificial Sequence
  Synthetic
gauagagcugagcagaagaaa

SEQ ID NO: 12146 - RNA, 21 nt, Artificial Sequence
  Synthetic
gcaaugucuuucuucugcuca

SEQ ID NO: 12147 - RNA, 21 nt, Artificial Sequence
  Synthetic
gcagaagaaagacauugccac

SEQ ID NO: 12148 - RNA, 21 nt, Artificial Sequence
  Synthetic
gcugagcagaagaaagacauu

SEQ ID NO: 12149 - RNA, 21 nt, Artificial Sequence
  Synthetic
gcuguggcaaugucuuucuuc

SEQ ID NO: 12150 - RNA, 21 nt, Artificial Sequence
  Synthetic
ggauagagcugagcagaagaa

SEQ ID NO: 12151 - RNA, 21 nt, Artificial Sequence
  Synthetic
ggcaaugucuuucuucugcuc

SEQ ID NO: 12152 - RNA, 21 nt, Artificial Sequence
  Synthetic
ggcuguggcaaugucuuucuu

SEQ ID NO: 12153 - RNA, 21 nt, Artificial Sequence
  Synthetic
gucuuucuucugcucagcucu

SEQ ID NO: 12154 - RNA, 21 nt, Artificial Sequence
  Synthetic
guggcaaugucuuucuucugc

SEQ ID NO: 12155 - RNA, 21 nt, Artificial Sequence
  Synthetic
uagagcugagcagaagaaaga

SEQ ID NO: 12156 - RNA, 21 nt, Artificial Sequence
  Synthetic
uauggauagagcugagcagaa

SEQ ID NO: 12157 - RNA, 21 nt, Artificial Sequence
  Synthetic
ucaucuauggauagagcugag

SEQ ID NO: 12158 - RNA, 21 nt, Artificial Sequence
  Synthetic
ucuauggauagagcugagcag

SEQ ID NO: 12159 - RNA, 21 nt, Artificial Sequence
  Synthetic
ucugcucagcucuauccauag

SEQ ID NO: 12160 - RNA, 21 nt, Artificial Sequence
  Synthetic
ucuucugcucagcucuaucca

SEQ ID NO: 12161 - RNA, 21 nt, Artificial Sequence
  Synthetic
ucuuucuucugcucagcucua

SEQ ID NO: 12162 - RNA, 21 nt, Artificial Sequence
  Synthetic
ugagcagaagaaagacauugc

SEQ ID NO: 12163 - RNA, 21 nt, Artificial Sequence
  Synthetic
uggauagagcugagcagaaga

SEQ ID NO: 12164 - RNA, 21 nt, Artificial Sequence
  Synthetic
uggcaaugucuuucuucugcu

SEQ ID NO: 12165 - RNA, 21 nt, Artificial Sequence
  Synthetic
uggcuguggcaaugucuuucu

SEQ ID NO: 12166 - RNA, 21 nt, Artificial Sequence
  Synthetic
ugucuuucuucugcucagcuc

SEQ ID NO: 12167 - RNA, 21 nt, Artificial Sequence
  Synthetic
uguggcaaugucuuucuucug

SEQ ID NO: 12168 - RNA, 21 nt, Artificial Sequence
  Synthetic
uucaucuauggauagagcuga

SEQ ID NO: 12169 - RNA, 21 nt, Artificial Sequence
  Synthetic
uucugcucagcucuauccaua

SEQ ID NO: 12170 - RNA, 21 nt, Artificial Sequence
  Synthetic
uucuucugcucagcucuaucc

SEQ ID NO: 12171 - RNA, 21 nt, Artificial Sequence
  Synthetic
uuggcuguggcaaugucuuuc

SEQ ID NO: 12172 - RNA, 21 nt, Artificial Sequence
  Synthetic
uuucaucuauggauagagcug

SEQ ID NO: 12173 - RNA, 21 nt, Artificial Sequence
  Synthetic
uuucuucugcucagcucuauc

SEQ ID NO: 12174 - RNA, 22 nt, Artificial Sequence
  Synthetic
aaugucuuucuucugcucagcu

SEQ ID NO: 12175 - RNA, 22 nt, Artificial Sequence
  Synthetic
agagcugagcagaagaaagaca

SEQ ID NO: 12176 - RNA, 22 nt, Artificial Sequence
  Synthetic
agcagaagaaagacauugccac

SEQ ID NO: 12177 - RNA, 22 nt, Artificial Sequence
  Synthetic
agcugagcagaagaaagacauu

SEQ ID NO: 12178 - RNA, 22 nt, Artificial Sequence
  Synthetic
auagagcugagcagaagaaaga

SEQ ID NO: 12179 - RNA, 22 nt, Artificial Sequence
  Synthetic
aucuauggauagagcugagcag

SEQ ID NO: 12180 - RNA, 22 nt, Artificial Sequence
  Synthetic
auggauagagcugagcagaaga

SEQ ID NO: 12181 - RNA, 22 nt, Artificial Sequence
  Synthetic
augucuuucuucugcucagcuc

SEQ ID NO: 12182 - RNA, 22 nt, Artificial Sequence
  Synthetic
caaugucuuucuucugcucagc

SEQ ID NO: 12183 - RNA, 22 nt, Artificial Sequence
  Synthetic
cagaagaaagacauugccacag

SEQ ID NO: 12184 - RNA, 22 nt, Artificial Sequence
  Synthetic
caucuauggauagagcugagca

SEQ ID NO: 12185 - RNA, 22 nt, Artificial Sequence
  Synthetic
cuauggauagagcugagcagaa

SEQ ID NO: 12186 - RNA, 22 nt, Artificial Sequence
  Synthetic
cugagcagaagaaagacauugc

SEQ ID NO: 12187 - RNA, 22 nt, Artificial Sequence
  Synthetic
cugcucagcucuauccauagau

SEQ ID NO: 12188 - RNA, 22 nt, Artificial Sequence
  Synthetic
cuguggcaaugucuuucuucug

SEQ ID NO: 12189 - RNA, 22 nt, Artificial Sequence
  Synthetic
cuucugcucagcucuauccaua

SEQ ID NO: 12190 - RNA, 22 nt, Artificial Sequence
  Synthetic
cuuucuucugcucagcucuauc

SEQ ID NO: 12191 - RNA, 22 nt, Artificial Sequence
  Synthetic
gagcagaagaaagacauugcca

SEQ ID NO: 12192 - RNA, 22 nt, Artificial Sequence
  Synthetic
gagcugagcagaagaaagacau

SEQ ID NO: 12193 - RNA, 22 nt, Artificial Sequence
  Synthetic
gauagagcugagcagaagaaag

SEQ ID NO: 12194 - RNA, 22 nt, Artificial Sequence
  Synthetic
gcaaugucuuucuucugcucag

SEQ ID NO: 12195 - RNA, 22 nt, Artificial Sequence
  Synthetic
gcagaagaaagacauugccaca

SEQ ID NO: 12196 - RNA, 22 nt, Artificial Sequence
  Synthetic
gcugagcagaagaaagacauug

SEQ ID NO: 12197 - RNA, 22 nt, Artificial Sequence
  Synthetic
gcuguggcaaugucuuucuucu

SEQ ID NO: 12198 - RNA, 22 nt, Artificial Sequence
  Synthetic
ggauagagcugagcagaagaaa

SEQ ID NO: 12199 - RNA, 22 nt, Artificial Sequence
  Synthetic
ggcaaugucuuucuucugcuca

SEQ ID NO: 12200 - RNA, 22 nt, Artificial Sequence
  Synthetic
ggcuguggcaaugucuuucuuc

SEQ ID NO: 12201 - RNA, 22 nt, Artificial Sequence
  Synthetic
gucuuucuucugcucagcucua

SEQ ID NO: 12202 - RNA, 22 nt, Artificial Sequence
  Synthetic
guggcaaugucuuucuucugcu

SEQ ID NO: 12203 - RNA, 22 nt, Artificial Sequence
  Synthetic
guuggcuguggcaaugucuuuc

SEQ ID NO: 12204 - RNA, 22 nt, Artificial Sequence
  Synthetic
guuucaucuauggauagagcug

SEQ ID NO: 12205 - RNA, 22 nt, Artificial Sequence
  Synthetic
uagagcugagcagaagaaagac

SEQ ID NO: 12206 - RNA, 22 nt, Artificial Sequence
  Synthetic
uauggauagagcugagcagaag

SEQ ID NO: 12207 - RNA, 22 nt, Artificial Sequence
  Synthetic
ucaucuauggauagagcugagc

SEQ ID NO: 12208 - RNA, 22 nt, Artificial Sequence
  Synthetic
ucuauggauagagcugagcaga

SEQ ID NO: 12209 - RNA, 22 nt, Artificial Sequence
  Synthetic
ucugcucagcucuauccauaga

SEQ ID NO: 12210 - RNA, 22 nt, Artificial Sequence
  Synthetic
ucuucugcucagcucuauccau

SEQ ID NO: 12211 - RNA, 22 nt, Artificial Sequence
  Synthetic
ucuuucuucugcucagcucuau

SEQ ID NO: 12212 - RNA, 22 nt, Artificial Sequence
  Synthetic
ugagcagaagaaagacauugcc

SEQ ID NO: 12213 - RNA, 22 nt, Artificial Sequence
  Synthetic
uggauagagcugagcagaagaa

SEQ ID NO: 12214 - RNA, 22 nt, Artificial Sequence
  Synthetic
uggcaaugucuuucuucugcuc

SEQ ID NO: 12215 - RNA, 22 nt, Artificial Sequence
  Synthetic
uggcuguggcaaugucuuucuu

SEQ ID NO: 12216 - RNA, 22 nt, Artificial Sequence
  Synthetic
ugucuuucuucugcucagcucu

SEQ ID NO: 12217 - RNA, 22 nt, Artificial Sequence
  Synthetic
uguggcaaugucuuucuucugc

SEQ ID NO: 12218 - RNA, 22 nt, Artificial Sequence
  Synthetic
uucaucuauggauagagcugag

SEQ ID NO: 12219 - RNA, 22 nt, Artificial Sequence
  Synthetic
uucugcucagcucuauccauag

SEQ ID NO: 12220 - RNA, 22 nt, Artificial Sequence
  Synthetic
uucuucugcucagcucuaucca

SEQ ID NO: 12221 - RNA, 22 nt, Artificial Sequence
  Synthetic
uuggcuguggcaaugucuuucu

SEQ ID NO: 12222 - RNA, 22 nt, Artificial Sequence
  Synthetic
uuucaucuauggauagagcuga

SEQ ID NO: 12223 - RNA, 22 nt, Artificial Sequence
  Synthetic
uuucuucugcucagcucuaucc

SEQ ID NO: 12224 - RNA, 20 nt, Artificial Sequence
  Synthetic
aagaagcacagggcuggcug

SEQ ID NO: 12225 - RNA, 20 nt, Artificial Sequence
  Synthetic
aagcacagggcuggcugcuc

SEQ ID NO: 12226 - RNA, 20 nt, Artificial Sequence
  Synthetic
acagcaagaagcacagggcu

SEQ ID NO: 12227 - RNA, 20 nt, Artificial Sequence
  Synthetic
acagggcuggcugcucagau

SEQ ID NO: 12228 - RNA, 20 nt, Artificial Sequence
  Synthetic
agaagcacagggcuggcugc

SEQ ID NO: 12229 - RNA, 20 nt, Artificial Sequence
  Synthetic
agcaagaagcacagggcugg

SEQ ID NO: 12230 - RNA, 20 nt, Artificial Sequence
  Synthetic
agcacagggcuggcugcuca

SEQ ID NO: 12231 - RNA, 20 nt, Artificial Sequence
  Synthetic
agcagccagcccugugcuuc

SEQ ID NO: 12232 - RNA, 20 nt, Artificial Sequence
  Synthetic
agggcuggcugcucagaugg

SEQ ID NO: 12233 - RNA, 20 nt, Artificial Sequence
  Synthetic
aucugagcagccagcccugu

SEQ ID NO: 12234 - RNA, 20 nt, Artificial Sequence
  Synthetic
auggcccaucugagcagcca

SEQ ID NO: 12235 - RNA, 20 nt, Artificial Sequence
  Synthetic
caagaagcacagggcuggcu

SEQ ID NO: 12236 - RNA, 20 nt, Artificial Sequence
  Synthetic
cacagggcuggcugcucaga

SEQ ID NO: 12237 - RNA, 20 nt, Artificial Sequence
  Synthetic
cagcaagaagcacagggcug

SEQ ID NO: 12238 - RNA, 20 nt, Artificial Sequence
  Synthetic
cagccagcccugugcuucuu

SEQ ID NO: 12239 - RNA, 20 nt, Artificial Sequence
  Synthetic
cagggcuggcugcucagaug

SEQ ID NO: 12240 - RNA, 20 nt, Artificial Sequence
  Synthetic
caucugagcagccagcccug

SEQ ID NO: 12241 - RNA, 20 nt, Artificial Sequence
  Synthetic
ccaucugagcagccagcccu

SEQ ID NO: 12242 - RNA, 20 nt, Artificial Sequence
  Synthetic
cccaucugagcagccagccc

SEQ ID NO: 12243 - RNA, 20 nt, Artificial Sequence
  Synthetic
cugagcagccagcccugugc

SEQ ID NO: 12244 - RNA, 20 nt, Artificial Sequence
  Synthetic
cugcucagaugggccaucca

SEQ ID NO: 12245 - RNA, 20 nt, Artificial Sequence
  Synthetic
cuggcugcucagaugggcca

SEQ ID NO: 12246 - RNA, 20 nt, Artificial Sequence
  Synthetic
gaagcacagggcuggcugcu

SEQ ID NO: 12247 - RNA, 20 nt, Artificial Sequence
  Synthetic
gagcagccagcccugugcuu

SEQ ID NO: 12248 - RNA, 20 nt, Artificial Sequence
  Synthetic
gauggcccaucugagcagcc

SEQ ID NO: 12249 - RNA, 20 nt, Artificial Sequence
  Synthetic
gcaagaagcacagggcuggc

SEQ ID NO: 12250 - RNA, 20 nt, Artificial Sequence
  Synthetic
gcacagggcuggcugcucag

SEQ ID NO: 12251 - RNA, 20 nt, Artificial Sequence
  Synthetic
gcagccagcccugugcuucu

SEQ ID NO: 12252 - RNA, 20 nt, Artificial Sequence
  Synthetic
gcccaucugagcagccagcc

SEQ ID NO: 12253 - RNA, 20 nt, Artificial Sequence
  Synthetic
gcugcucagaugggccaucc

SEQ ID NO: 12254 - RNA, 20 nt, Artificial Sequence
  Synthetic
gcuggcugcucagaugggcc

SEQ ID NO: 12255 - RNA, 20 nt, Artificial Sequence
  Synthetic
ggauggcccaucugagcagc

SEQ ID NO: 12256 - RNA, 20 nt, Artificial Sequence
  Synthetic
ggcccaucugagcagccagc

SEQ ID NO: 12257 - RNA, 20 nt, Artificial Sequence
  Synthetic
ggcugcucagaugggccauc

SEQ ID NO: 12258 - RNA, 20 nt, Artificial Sequence
  Synthetic
ggcuggcugcucagaugggc

SEQ ID NO: 12259 - RNA, 20 nt, Artificial Sequence
  Synthetic
gggcuggcugcucagauggg

SEQ ID NO: 12260 - RNA, 20 nt, Artificial Sequence
  Synthetic
gguggauggcccaucugagc

SEQ ID NO: 12261 - RNA, 20 nt, Artificial Sequence
  Synthetic
guggauggcccaucugagca

SEQ ID NO: 12262 - RNA, 20 nt, Artificial Sequence
  Synthetic
guugguggauggcccaucug

SEQ ID NO: 12263 - RNA, 20 nt, Artificial Sequence
  Synthetic
ucugagcagccagcccugug

SEQ ID NO: 12264 - RNA, 20 nt, Artificial Sequence
  Synthetic
ugagcagccagcccugugcu

SEQ ID NO: 12265 - RNA, 20 nt, Artificial Sequence
  Synthetic
uggauggcccaucugagcag

SEQ ID NO: 12266 - RNA, 20 nt, Artificial Sequence
  Synthetic
uggcccaucugagcagccag

SEQ ID NO: 12267 - RNA, 20 nt, Artificial Sequence
  Synthetic
uggcugcucagaugggccau

SEQ ID NO: 12268 - RNA, 20 nt, Artificial Sequence
  Synthetic
ugguggauggcccaucugag

SEQ ID NO: 12269 - RNA, 20 nt, Artificial Sequence
  Synthetic
uugguggauggcccaucuga

SEQ ID NO: 12270 - RNA, 21 nt, Artificial Sequence
  Synthetic
aacagcaagaagcacagggcu

SEQ ID NO: 12271 - RNA, 21 nt, Artificial Sequence
  Synthetic
aagaagcacagggcuggcugc

SEQ ID NO: 12272 - RNA, 21 nt, Artificial Sequence
  Synthetic
aagcacagggcuggcugcuca

SEQ ID NO: 12273 - RNA, 21 nt, Artificial Sequence
  Synthetic
acagcaagaagcacagggcug

SEQ ID NO: 12274 - RNA, 21 nt, Artificial Sequence
  Synthetic
acagggcuggcugcucagaug

SEQ ID NO: 12275 - RNA, 21 nt, Artificial Sequence
  Synthetic
agaagcacagggcuggcugcu

SEQ ID NO: 12276 - RNA, 21 nt, Artificial Sequence
  Synthetic
agcaagaagcacagggcuggc

SEQ ID NO: 12277 - RNA, 21 nt, Artificial Sequence
  Synthetic
agcacagggcuggcugcucag

SEQ ID NO: 12278 - RNA, 21 nt, Artificial Sequence
  Synthetic
agcagccagcccugugcuucu

SEQ ID NO: 12279 - RNA, 21 nt, Artificial Sequence
  Synthetic
agggcuggcugcucagauggg

SEQ ID NO: 12280 - RNA, 21 nt, Artificial Sequence
  Synthetic
aucugagcagccagcccugug

SEQ ID NO: 12281 - RNA, 21 nt, Artificial Sequence
  Synthetic
auggcccaucugagcagccag

SEQ ID NO: 12282 - RNA, 21 nt, Artificial Sequence
  Synthetic
caagaagcacagggcuggcug

SEQ ID NO: 12283 - RNA, 21 nt, Artificial Sequence
  Synthetic
cacagggcuggcugcucagau

SEQ ID NO: 12284 - RNA, 21 nt, Artificial Sequence
  Synthetic
cagcaagaagcacagggcugg

SEQ ID NO: 12285 - RNA, 21 nt, Artificial Sequence
  Synthetic
cagccagcccugugcuucuug

SEQ ID NO: 12286 - RNA, 21 nt, Artificial Sequence
  Synthetic
cagggcuggcugcucagaugg

SEQ ID NO: 12287 - RNA, 21 nt, Artificial Sequence
  Synthetic
caucugagcagccagcccugu

SEQ ID NO: 12288 - RNA, 21 nt, Artificial Sequence
  Synthetic
ccaucugagcagccagcccug

SEQ ID NO: 12289 - RNA, 21 nt, Artificial Sequence
  Synthetic
cccaucugagcagccagcccu

SEQ ID NO: 12290 - RNA, 21 nt, Artificial Sequence
  Synthetic
cugagcagccagcccugugcu

SEQ ID NO: 12291 - RNA, 21 nt, Artificial Sequence
  Synthetic
cugcucagaugggccauccac

SEQ ID NO: 12292 - RNA, 21 nt, Artificial Sequence
  Synthetic
cuggcugcucagaugggccau

SEQ ID NO: 12293 - RNA, 21 nt, Artificial Sequence
  Synthetic
gaagcacagggcuggcugcuc

SEQ ID NO: 12294 - RNA, 21 nt, Artificial Sequence
  Synthetic
gagcagccagcccugugcuuc

SEQ ID NO: 12295 - RNA, 21 nt, Artificial Sequence
  Synthetic
gauggcccaucugagcagcca

SEQ ID NO: 12296 - RNA, 21 nt, Artificial Sequence
  Synthetic
gcaagaagcacagggcuggcu

SEQ ID NO: 12297 - RNA, 21 nt, Artificial Sequence
  Synthetic
gcacagggcuggcugcucaga

SEQ ID NO: 12298 - RNA, 21 nt, Artificial Sequence
  Synthetic
gcagccagcccugugcuucuu

SEQ ID NO: 12299 - RNA, 21 nt, Artificial Sequence
  Synthetic
gcccaucugagcagccagccc

SEQ ID NO: 12300 - RNA, 21 nt, Artificial Sequence
  Synthetic
gcugcucagaugggccaucca

SEQ ID NO: 12301 - RNA, 21 nt, Artificial Sequence
  Synthetic
gcuggcugcucagaugggcca

SEQ ID NO: 12302 - RNA, 21 nt, Artificial Sequence
  Synthetic
ggauggcccaucugagcagcc

SEQ ID NO: 12303 - RNA, 21 nt, Artificial Sequence
  Synthetic
ggcccaucugagcagccagcc

SEQ ID NO: 12304 - RNA, 21 nt, Artificial Sequence
  Synthetic
ggcugcucagaugggccaucc

SEQ ID NO: 12305 - RNA, 21 nt, Artificial Sequence
  Synthetic
ggcuggcugcucagaugggcc

SEQ ID NO: 12306 - RNA, 21 nt, Artificial Sequence
  Synthetic
gggcuggcugcucagaugggc

SEQ ID NO: 12307 - RNA, 21 nt, Artificial Sequence
  Synthetic
gguggauggcccaucugagca

SEQ ID NO: 12308 - RNA, 21 nt, Artificial Sequence
  Synthetic
guggauggcccaucugagcag

SEQ ID NO: 12309 - RNA, 21 nt, Artificial Sequence
  Synthetic
guugguggauggcccaucuga

SEQ ID NO: 12310 - RNA, 21 nt, Artificial Sequence
  Synthetic
ucugagcagccagcccugugc

SEQ ID NO: 12311 - RNA, 21 nt, Artificial Sequence
  Synthetic
ugagcagccagcccugugcuu

SEQ ID NO: 12312 - RNA, 21 nt, Artificial Sequence
  Synthetic
uggauggcccaucugagcagc

SEQ ID NO: 12313 - RNA, 21 nt, Artificial Sequence
  Synthetic
uggcccaucugagcagccagc

SEQ ID NO: 12314 - RNA, 21 nt, Artificial Sequence
  Synthetic
uggcugcucagaugggccauc

SEQ ID NO: 12315 - RNA, 21 nt, Artificial Sequence
  Synthetic
ugguggauggcccaucugagc

SEQ ID NO: 12316 - RNA, 21 nt, Artificial Sequence
  Synthetic
uguugguggauggcccaucug

SEQ ID NO: 12317 - RNA, 21 nt, Artificial Sequence
  Synthetic
uugguggauggcccaucugag

SEQ ID NO: 12318 - RNA, 22 nt, Artificial Sequence
  Synthetic
aacagcaagaagcacagggcug

SEQ ID NO: 12319 - RNA, 22 nt, Artificial Sequence
  Synthetic
aagaagcacagggcuggcugcu

SEQ ID NO: 12320 - RNA, 22 nt, Artificial Sequence
  Synthetic
aagcacagggcuggcugcucag

SEQ ID NO: 12321 - RNA, 22 nt, Artificial Sequence
  Synthetic
acagcaagaagcacagggcugg

SEQ ID NO: 12322 - RNA, 22 nt, Artificial Sequence
  Synthetic
acagggcuggcugcucagaugg

SEQ ID NO: 12323 - RNA, 22 nt, Artificial Sequence
  Synthetic
agaagcacagggcuggcugcuc

SEQ ID NO: 12324 - RNA, 22 nt, Artificial Sequence
  Synthetic
agcaagaagcacagggcuggcu

SEQ ID NO: 12325 - RNA, 22 nt, Artificial Sequence
  Synthetic
agcacagggcuggcugcucaga

SEQ ID NO: 12326 - RNA, 22 nt, Artificial Sequence
  Synthetic
agcagccagcccugugcuucuu

SEQ ID NO: 12327 - RNA, 22 nt, Artificial Sequence
  Synthetic
agggcuggcugcucagaugggc

SEQ ID NO: 12328 - RNA, 22 nt, Artificial Sequence
  Synthetic
aucugagcagccagcccugugc

SEQ ID NO: 12329 - RNA, 22 nt, Artificial Sequence
  Synthetic
auggcccaucugagcagccagc

SEQ ID NO: 12330 - RNA, 22 nt, Artificial Sequence
  Synthetic
auguugguggauggcccaucug

SEQ ID NO: 12331 - RNA, 22 nt, Artificial Sequence
  Synthetic
caacagcaagaagcacagggcu

SEQ ID NO: 12332 - RNA, 22 nt, Artificial Sequence
  Synthetic
caagaagcacagggcuggcugc

SEQ ID NO: 12333 - RNA, 22 nt, Artificial Sequence
  Synthetic
cacagggcuggcugcucagaug

SEQ ID NO: 12334 - RNA, 22 nt, Artificial Sequence
  Synthetic
cagcaagaagcacagggcuggc

SEQ ID NO: 12335 - RNA, 22 nt, Artificial Sequence
  Synthetic
cagccagcccugugcuucuugc

SEQ ID NO: 12336 - RNA, 22 nt, Artificial Sequence
  Synthetic
cagggcuggcugcucagauggg

SEQ ID NO: 12337 - RNA, 22 nt, Artificial Sequence
  Synthetic
caucugagcagccagcccugug

SEQ ID NO: 12338 - RNA, 22 nt, Artificial Sequence
  Synthetic
ccaucugagcagccagcccugu

SEQ ID NO: 12339 - RNA, 22 nt, Artificial Sequence
  Synthetic
cccaucugagcagccagcccug

SEQ ID NO: 12340 - RNA, 22 nt, Artificial Sequence
  Synthetic
cugagcagccagcccugugcuu

SEQ ID NO: 12341 - RNA, 22 nt, Artificial Sequence
  Synthetic
cugcucagaugggccauccacc

SEQ ID NO: 12342 - RNA, 22 nt, Artificial Sequence
  Synthetic
cuggcugcucagaugggccauc

SEQ ID NO: 12343 - RNA, 22 nt, Artificial Sequence
  Synthetic
gaagcacagggcuggcugcuca

SEQ ID NO: 12344 - RNA, 22 nt, Artificial Sequence
  Synthetic
gagcagccagcccugugcuucu

SEQ ID NO: 12345 - RNA, 22 nt, Artificial Sequence
  Synthetic
gauggcccaucugagcagccag

SEQ ID NO: 12346 - RNA, 22 nt, Artificial Sequence
  Synthetic
gcaagaagcacagggcuggcug

SEQ ID NO: 12347 - RNA, 22 nt, Artificial Sequence
  Synthetic
gcacagggcuggcugcucagau

SEQ ID NO: 12348 - RNA, 22 nt, Artificial Sequence
  Synthetic
gcagccagcccugugcuucuug

SEQ ID NO: 12349 - RNA, 22 nt, Artificial Sequence
  Synthetic
gcccaucugagcagccagcccu

SEQ ID NO: 12350 - RNA, 22 nt, Artificial Sequence
  Synthetic
gcugcucagaugggccauccac

SEQ ID NO: 12351 - RNA, 22 nt, Artificial Sequence
  Synthetic
gcuggcugcucagaugggccau

SEQ ID NO: 12352 - RNA, 22 nt, Artificial Sequence
  Synthetic
ggauggcccaucugagcagcca

SEQ ID NO: 12353 - RNA, 22 nt, Artificial Sequence
  Synthetic
ggcccaucugagcagccagccc

SEQ ID NO: 12354 - RNA, 22 nt, Artificial Sequence
  Synthetic
ggcugcucagaugggccaucca

SEQ ID NO: 12355 - RNA, 22 nt, Artificial Sequence
  Synthetic
ggcuggcugcucagaugggcca

SEQ ID NO: 12356 - RNA, 22 nt, Artificial Sequence
  Synthetic
gggcuggcugcucagaugggcc

SEQ ID NO: 12357 - RNA, 22 nt, Artificial Sequence
  Synthetic
gguggauggcccaucugagcag

SEQ ID NO: 12358 - RNA, 22 nt, Artificial Sequence
  Synthetic
guggauggcccaucugagcagc

SEQ ID NO: 12359 - RNA, 22 nt, Artificial Sequence
  Synthetic
guugguggauggcccaucugag

SEQ ID NO: 12360 - RNA, 22 nt, Artificial Sequence
  Synthetic
ucugagcagccagcccugugcu

SEQ ID NO: 12361 - RNA, 22 nt, Artificial Sequence
  Synthetic
ugagcagccagcccugugcuuc

SEQ ID NO: 12362 - RNA, 22 nt, Artificial Sequence
  Synthetic
uggauggcccaucugagcagcc

SEQ ID NO: 12363 - RNA, 22 nt, Artificial Sequence
  Synthetic
uggcccaucugagcagccagcc

SEQ ID NO: 12364 - RNA, 22 nt, Artificial Sequence
  Synthetic
uggcugcucagaugggccaucc

SEQ ID NO: 12365 - RNA, 22 nt, Artificial Sequence
  Synthetic
ugguggauggcccaucugagca

SEQ ID NO: 12366 - RNA, 22 nt, Artificial Sequence
  Synthetic
uguugguggauggcccaucuga

SEQ ID NO: 12367 - RNA, 22 nt, Artificial Sequence
  Synthetic
uugguggauggcccaucugagc

SEQ ID NO: 12368 - RNA, 20 nt, Artificial Sequence
  Synthetic
aacgucgggaugccuggacu

SEQ ID NO: 12369 - RNA, 20 nt, Artificial Sequence
  Synthetic
accaacgucgggaugccugg

SEQ ID NO: 12370 - RNA, 20 nt, Artificial Sequence
  Synthetic
acgucgggaugccuggacua

SEQ ID NO: 12371 - RNA, 20 nt, Artificial Sequence
  Synthetic
acguugguggauggcccauc

SEQ ID NO: 12372 - RNA, 20 nt, Artificial Sequence
  Synthetic
agaugggccauccaccaacg

SEQ ID NO: 12373 - RNA, 20 nt, Artificial Sequence
  Synthetic
aggcaucccgacguuggugg

SEQ ID NO: 12374 - RNA, 20 nt, Artificial Sequence
  Synthetic
aguccaggcaucccgacguu

SEQ ID NO: 12375 - RNA, 20 nt, Artificial Sequence
  Synthetic
auccaccaacgucgggaugc

SEQ ID NO: 12376 - RNA, 20 nt, Artificial Sequence
  Synthetic
aucccgacguugguggaugg

SEQ ID NO: 12377 - RNA, 20 nt, Artificial Sequence
  Synthetic
augggccauccaccaacguc

SEQ ID NO: 12378 - RNA, 20 nt, Artificial Sequence
  Synthetic
caacgucgggaugccuggac

SEQ ID NO: 12379 - RNA, 20 nt, Artificial Sequence
  Synthetic
caccaacgucgggaugccug

SEQ ID NO: 12380 - RNA, 20 nt, Artificial Sequence
  Synthetic
cagaugggccauccaccaac

SEQ ID NO: 12381 - RNA, 20 nt, Artificial Sequence
  Synthetic
caggcaucccgacguuggug

SEQ ID NO: 12382 - RNA, 20 nt, Artificial Sequence
  Synthetic
cauccaccaacgucgggaug

SEQ ID NO: 12383 - RNA, 20 nt, Artificial Sequence
  Synthetic
caucccgacguugguggaug

SEQ ID NO: 12384 - RNA, 20 nt, Artificial Sequence
  Synthetic
ccaacgucgggaugccugga

SEQ ID NO: 12385 - RNA, 20 nt, Artificial Sequence
  Synthetic
ccaccaacgucgggaugccu

SEQ ID NO: 12386 - RNA, 20 nt, Artificial Sequence
  Synthetic
ccaggcaucccgacguuggu

SEQ ID NO: 12387 - RNA, 20 nt, Artificial Sequence
  Synthetic
ccauccaccaacgucgggau

SEQ ID NO: 12388 - RNA, 20 nt, Artificial Sequence
  Synthetic
cccgacguugguggauggcc

SEQ ID NO: 12389 - RNA, 20 nt, Artificial Sequence
  Synthetic
ccgacguugguggauggccc

SEQ ID NO: 12390 - RNA, 20 nt, Artificial Sequence
  Synthetic
ccuaguccaggcaucccgac

SEQ ID NO: 12391 - RNA, 20 nt, Artificial Sequence
  Synthetic
cgacguugguggauggccca

SEQ ID NO: 12392 - RNA, 20 nt, Artificial Sequence
  Synthetic
cgucgggaugccuggacuag

SEQ ID NO: 12393 - RNA, 20 nt, Artificial Sequence
  Synthetic
cuaguccaggcaucccgacg

SEQ ID NO: 12394 - RNA, 20 nt, Artificial Sequence
  Synthetic
cucagaugggccauccacca

SEQ ID NO: 12395 - RNA, 20 nt, Artificial Sequence
  Synthetic
cuuuccuaguccaggcaucc

SEQ ID NO: 12396 - RNA, 20 nt, Artificial Sequence
  Synthetic
gacguugguggauggcccau

SEQ ID NO: 12397 - RNA, 20 nt, Artificial Sequence
  Synthetic
gaugggccauccaccaacgu

SEQ ID NO: 12398 - RNA, 20 nt, Artificial Sequence
  Synthetic
gcaucccgacguugguggau

SEQ ID NO: 12399 - RNA, 20 nt, Artificial Sequence
  Synthetic
gccauccaccaacgucggga

SEQ ID NO: 12400 - RNA, 20 nt, Artificial Sequence
  Synthetic
gcucagaugggccauccacc

SEQ ID NO: 12401 - RNA, 20 nt, Artificial Sequence
  Synthetic
ggcaucccgacguuggugga

SEQ ID NO: 12402 - RNA, 20 nt, Artificial Sequence
  Synthetic
ggccauccaccaacgucggg

SEQ ID NO: 12403 - RNA, 20 nt, Artificial Sequence
  Synthetic
gggccauccaccaacgucgg

SEQ ID NO: 12404 - RNA, 20 nt, Artificial Sequence
  Synthetic
guccaggcaucccgacguug

SEQ ID NO: 12405 - RNA, 20 nt, Artificial Sequence
  Synthetic
uaguccaggcaucccgacgu

SEQ ID NO: 12406 - RNA, 20 nt, Artificial Sequence
  Synthetic
ucagaugggccauccaccaa

SEQ ID NO: 12407 - RNA, 20 nt, Artificial Sequence
  Synthetic
uccaccaacgucgggaugcc

SEQ ID NO: 12408 - RNA, 20 nt, Artificial Sequence
  Synthetic
uccaggcaucccgacguugg

SEQ ID NO: 12409 - RNA, 20 nt, Artificial Sequence
  Synthetic
ucccgacguugguggauggc

SEQ ID NO: 12410 - RNA, 20 nt, Artificial Sequence
  Synthetic
uccuaguccaggcaucccga

SEQ ID NO: 12411 - RNA, 20 nt, Artificial Sequence
  Synthetic
ugggccauccaccaacgucg

SEQ ID NO: 12412 - RNA, 20 nt, Artificial Sequence
  Synthetic
uuccuaguccaggcaucccg

SEQ ID NO: 12413 - RNA, 20 nt, Artificial Sequence
  Synthetic
uuuccuaguccaggcauccc

SEQ ID NO: 12414 - RNA, 21 nt, Artificial Sequence
  Synthetic
aacgucgggaugccuggacua

SEQ ID NO: 12415 - RNA, 21 nt, Artificial Sequence
  Synthetic
accaacgucgggaugccugga

SEQ ID NO: 12416 - RNA, 21 nt, Artificial Sequence
  Synthetic
acgucgggaugccuggacuag

SEQ ID NO: 12417 - RNA, 21 nt, Artificial Sequence
  Synthetic
acguugguggauggcccaucu

SEQ ID NO: 12418 - RNA, 21 nt, Artificial Sequence
  Synthetic
agaugggccauccaccaacgu

SEQ ID NO: 12419 - RNA, 21 nt, Artificial Sequence
  Synthetic
aggcaucccgacguuggugga

SEQ ID NO: 12420 - RNA, 21 nt, Artificial Sequence
  Synthetic
aguccaggcaucccgacguug

SEQ ID NO: 12421 - RNA, 21 nt, Artificial Sequence
  Synthetic
auccaccaacgucgggaugcc

SEQ ID NO: 12422 - RNA, 21 nt, Artificial Sequence
  Synthetic
aucccgacguugguggauggc

SEQ ID NO: 12423 - RNA, 21 nt, Artificial Sequence
  Synthetic
augggccauccaccaacgucg

SEQ ID NO: 12424 - RNA, 21 nt, Artificial Sequence
  Synthetic
caacgucgggaugccuggacu

SEQ ID NO: 12425 - RNA, 21 nt, Artificial Sequence
  Synthetic
caccaacgucgggaugccugg

SEQ ID NO: 12426 - RNA, 21 nt, Artificial Sequence
  Synthetic
cagaugggccauccaccaacg

SEQ ID NO: 12427 - RNA, 21 nt, Artificial Sequence
  Synthetic
caggcaucccgacguuggugg

SEQ ID NO: 12428 - RNA, 21 nt, Artificial Sequence
  Synthetic
cauccaccaacgucgggaugc

SEQ ID NO: 12429 - RNA, 21 nt, Artificial Sequence
  Synthetic
caucccgacguugguggaugg

SEQ ID NO: 12430 - RNA, 21 nt, Artificial Sequence
  Synthetic
ccaacgucgggaugccuggac

SEQ ID NO: 12431 - RNA, 21 nt, Artificial Sequence
  Synthetic
ccaccaacgucgggaugccug

SEQ ID NO: 12432 - RNA, 21 nt, Artificial Sequence
  Synthetic
ccaggcaucccgacguuggug

SEQ ID NO: 12433 - RNA, 21 nt, Artificial Sequence
  Synthetic
ccauccaccaacgucgggaug

SEQ ID NO: 12434 - RNA, 21 nt, Artificial Sequence
  Synthetic
cccgacguugguggauggccc

SEQ ID NO: 12435 - RNA, 21 nt, Artificial Sequence
  Synthetic
ccgacguugguggauggccca

SEQ ID NO: 12436 - RNA, 21 nt, Artificial Sequence
  Synthetic
ccuaguccaggcaucccgacg

SEQ ID NO: 12437 - RNA, 21 nt, Artificial Sequence
  Synthetic
ccuuuccuaguccaggcaucc

SEQ ID NO: 12438 - RNA, 21 nt, Artificial Sequence
  Synthetic
cgacguugguggauggcccau

SEQ ID NO: 12439 - RNA, 21 nt, Artificial Sequence
  Synthetic
cgcucagaugggccauccacc

SEQ ID NO: 12440 - RNA, 21 nt, Artificial Sequence
  Synthetic
cgucgggaugccuggacuagg

SEQ ID NO: 12441 - RNA, 21 nt, Artificial Sequence
  Synthetic
cuaguccaggcaucccgacgu

SEQ ID NO: 12442 - RNA, 21 nt, Artificial Sequence
  Synthetic
cucagaugggccauccaccaa

SEQ ID NO: 12443 - RNA, 21 nt, Artificial Sequence
  Synthetic
cuuuccuaguccaggcauccc

SEQ ID NO: 12444 - RNA, 21 nt, Artificial Sequence
  Synthetic
gacguugguggauggcccauc

SEQ ID NO: 12445 - RNA, 21 nt, Artificial Sequence
  Synthetic
gaugggccauccaccaacguc

SEQ ID NO: 12446 - RNA, 21 nt, Artificial Sequence
  Synthetic
gcaucccgacguugguggaug

SEQ ID NO: 12447 - RNA, 21 nt, Artificial Sequence
  Synthetic
gccauccaccaacgucgggau

SEQ ID NO: 12448 - RNA, 21 nt, Artificial Sequence
  Synthetic
gcucagaugggccauccacca

SEQ ID NO: 12449 - RNA, 21 nt, Artificial Sequence
  Synthetic
ggcaucccgacguugguggau

SEQ ID NO: 12450 - RNA, 21 nt, Artificial Sequence
  Synthetic
ggccauccaccaacgucggga

SEQ ID NO: 12451 - RNA, 21 nt, Artificial Sequence
  Synthetic
gggccauccaccaacgucggg

SEQ ID NO: 12452 - RNA, 21 nt, Artificial Sequence
  Synthetic
guccaggcaucccgacguugg

SEQ ID NO: 12453 - RNA, 21 nt, Artificial Sequence
  Synthetic
uaguccaggcaucccgacguu

SEQ ID NO: 12454 - RNA, 21 nt, Artificial Sequence
  Synthetic
ucagaugggccauccaccaac

SEQ ID NO: 12455 - RNA, 21 nt, Artificial Sequence
  Synthetic
uccaccaacgucgggaugccu

SEQ ID NO: 12456 - RNA, 21 nt, Artificial Sequence
  Synthetic
uccaggcaucccgacguuggu

SEQ ID NO: 12457 - RNA, 21 nt, Artificial Sequence
  Synthetic
ucccgacguugguggauggcc

SEQ ID NO: 12458 - RNA, 21 nt, Artificial Sequence
  Synthetic
uccuaguccaggcaucccgac

SEQ ID NO: 12459 - RNA, 21 nt, Artificial Sequence
  Synthetic
ugggccauccaccaacgucgg

SEQ ID NO: 12460 - RNA, 21 nt, Artificial Sequence
  Synthetic
uuccuaguccaggcaucccga

SEQ ID NO: 12461 - RNA, 21 nt, Artificial Sequence
  Synthetic
uuuccuaguccaggcaucccg

SEQ ID NO: 12462 - RNA, 22 nt, Artificial Sequence
  Synthetic
aacgucgggaugccuggacuag

SEQ ID NO: 12463 - RNA, 22 nt, Artificial Sequence
  Synthetic
accaacgucgggaugccuggac

SEQ ID NO: 12464 - RNA, 22 nt, Artificial Sequence
  Synthetic
acgucgggaugccuggacuagg

SEQ ID NO: 12465 - RNA, 22 nt, Artificial Sequence
  Synthetic
acguugguggauggcccaucug

SEQ ID NO: 12466 - RNA, 22 nt, Artificial Sequence
  Synthetic
agaugggccauccaccaacguc

SEQ ID NO: 12467 - RNA, 22 nt, Artificial Sequence
  Synthetic
aggcaucccgacguugguggau

SEQ ID NO: 12468 - RNA, 22 nt, Artificial Sequence
  Synthetic
aguccaggcaucccgacguugg

SEQ ID NO: 12469 - RNA, 22 nt, Artificial Sequence
  Synthetic
auccaccaacgucgggaugccu

SEQ ID NO: 12470 - RNA, 22 nt, Artificial Sequence
  Synthetic
aucccgacguugguggauggcc

SEQ ID NO: 12471 - RNA, 22 nt, Artificial Sequence
  Synthetic
augggccauccaccaacgucgg

SEQ ID NO: 12472 - RNA, 22 nt, Artificial Sequence
  Synthetic
caacgucgggaugccuggacua

SEQ ID NO: 12473 - RNA, 22 nt, Artificial Sequence
  Synthetic
caccaacgucgggaugccugga

SEQ ID NO: 12474 - RNA, 22 nt, Artificial Sequence
  Synthetic
cagaugggccauccaccaacgu

SEQ ID NO: 12475 - RNA, 22 nt, Artificial Sequence
  Synthetic
caggcaucccgacguuggugga

SEQ ID NO: 12476 - RNA, 22 nt, Artificial Sequence
  Synthetic
cauccaccaacgucgggaugcc

SEQ ID NO: 12477 - RNA, 22 nt, Artificial Sequence
  Synthetic
caucccgacguugguggauggc

SEQ ID NO: 12478 - RNA, 22 nt, Artificial Sequence
  Synthetic
ccaacgucgggaugccuggacu

SEQ ID NO: 12479 - RNA, 22 nt, Artificial Sequence
  Synthetic
ccaccaacgucgggaugccugg

SEQ ID NO: 12480 - RNA, 22 nt, Artificial Sequence
  Synthetic
ccaggcaucccgacguuggugg

SEQ ID NO: 12481 - RNA, 22 nt, Artificial Sequence
  Synthetic
ccauccaccaacgucgggaugc

SEQ ID NO: 12482 - RNA, 22 nt, Artificial Sequence
  Synthetic
cccgacguugguggauggccca

SEQ ID NO: 12483 - RNA, 22 nt, Artificial Sequence
  Synthetic
cccuuuccuaguccaggcaucc

SEQ ID NO: 12484 - RNA, 22 nt, Artificial Sequence
  Synthetic
ccgacguugguggauggcccau

SEQ ID NO: 12485 - RNA, 22 nt, Artificial Sequence
  Synthetic
ccgcucagaugggccauccacc

SEQ ID NO: 12486 - RNA, 22 nt, Artificial Sequence
  Synthetic
ccuaguccaggcaucccgacgu

SEQ ID NO: 12487 - RNA, 22 nt, Artificial Sequence
  Synthetic
ccuuuccuaguccaggcauccc

SEQ ID NO: 12488 - RNA, 22 nt, Artificial Sequence
  Synthetic
cgacguugguggauggcccauc

SEQ ID NO: 12489 - RNA, 22 nt, Artificial Sequence
  Synthetic
cgcucagaugggccauccacca

SEQ ID NO: 12490 - RNA, 22 nt, Artificial Sequence
  Synthetic
cgucgggaugccuggacuagga

SEQ ID NO: 12491 - RNA, 22 nt, Artificial Sequence
  Synthetic
cuaguccaggcaucccgacguu

SEQ ID NO: 12492 - RNA, 22 nt, Artificial Sequence
  Synthetic
cucagaugggccauccaccaac

SEQ ID NO: 12493 - RNA, 22 nt, Artificial Sequence
  Synthetic
cuuuccuaguccaggcaucccg

SEQ ID NO: 12494 - RNA, 22 nt, Artificial Sequence
  Synthetic
gacguugguggauggcccaucu

SEQ ID NO: 12495 - RNA, 22 nt, Artificial Sequence
  Synthetic
gaugggccauccaccaacgucg

SEQ ID NO: 12496 - RNA, 22 nt, Artificial Sequence
  Synthetic
gcaucccgacguugguggaugg

SEQ ID NO: 12497 - RNA, 22 nt, Artificial Sequence
  Synthetic
gccauccaccaacgucgggaug

SEQ ID NO: 12498 - RNA, 22 nt, Artificial Sequence
  Synthetic
gcucagaugggccauccaccaa

SEQ ID NO: 12499 - RNA, 22 nt, Artificial Sequence
  Synthetic
ggcaucccgacguugguggaug

SEQ ID NO: 12500 - RNA, 22 nt, Artificial Sequence
  Synthetic
ggccauccaccaacgucgggau

SEQ ID NO: 12501 - RNA, 22 nt, Artificial Sequence
  Synthetic
gggccauccaccaacgucggga

SEQ ID NO: 12502 - RNA, 22 nt, Artificial Sequence
  Synthetic
guccaggcaucccgacguuggu

SEQ ID NO: 12503 - RNA, 22 nt, Artificial Sequence
  Synthetic
uaguccaggcaucccgacguug

SEQ ID NO: 12504 - RNA, 22 nt, Artificial Sequence
  Synthetic
ucagaugggccauccaccaacg

SEQ ID NO: 12505 - RNA, 22 nt, Artificial Sequence
  Synthetic
uccaccaacgucgggaugccug

SEQ ID NO: 12506 - RNA, 22 nt, Artificial Sequence
  Synthetic
uccaggcaucccgacguuggug

SEQ ID NO: 12507 - RNA, 22 nt, Artificial Sequence
  Synthetic
ucccgacguugguggauggccc

SEQ ID NO: 12508 - RNA, 22 nt, Artificial Sequence
  Synthetic
uccuaguccaggcaucccgacg

SEQ ID NO: 12509 - RNA, 22 nt, Artificial Sequence
  Synthetic
ugggccauccaccaacgucggg

SEQ ID NO: 12510 - RNA, 22 nt, Artificial Sequence
  Synthetic
uuccuaguccaggcaucccgac

SEQ ID NO: 12511 - RNA, 22 nt, Artificial Sequence
  Synthetic
uuuccuaguccaggcaucccga

SEQ ID NO: 12512 - RNA, 20 nt, Artificial Sequence
  Synthetic
aacaucgggaucccuggacu

SEQ ID NO: 12513 - RNA, 20 nt, Artificial Sequence
  Synthetic
acaucgggaucccuggacua

SEQ ID NO: 12514 - RNA, 20 nt, Artificial Sequence
  Synthetic
accaacaucgggaucccugg

SEQ ID NO: 12515 - RNA, 20 nt, Artificial Sequence
  Synthetic
agcccuuuccuaguccaggg

SEQ ID NO: 12516 - RNA, 20 nt, Artificial Sequence
  Synthetic
agggaucccgauguuggugg

SEQ ID NO: 12517 - RNA, 20 nt, Artificial Sequence
  Synthetic
aguccagggaucccgauguu

SEQ ID NO: 12518 - RNA, 20 nt, Artificial Sequence
  Synthetic
auccaccaacaucgggaucc

SEQ ID NO: 12519 - RNA, 20 nt, Artificial Sequence
  Synthetic
aucccuggacuaggaaaggg

SEQ ID NO: 12520 - RNA, 20 nt, Artificial Sequence
  Synthetic
aucgggaucccuggacuagg

SEQ ID NO: 12521 - RNA, 20 nt, Artificial Sequence
  Synthetic
caacaucgggaucccuggac

SEQ ID NO: 12522 - RNA, 20 nt, Artificial Sequence
  Synthetic
caccaacaucgggaucccug

SEQ ID NO: 12523 - RNA, 20 nt, Artificial Sequence
  Synthetic
cagggaucccgauguuggug

SEQ ID NO: 12524 - RNA, 20 nt, Artificial Sequence
  Synthetic
cauccaccaacaucgggauc

SEQ ID NO: 12525 - RNA, 20 nt, Artificial Sequence
  Synthetic
caucgggaucccuggacuag

SEQ ID NO: 12526 - RNA, 20 nt, Artificial Sequence
  Synthetic
ccaacaucgggaucccugga

SEQ ID NO: 12527 - RNA, 20 nt, Artificial Sequence
  Synthetic
ccaccaacaucgggaucccu

SEQ ID NO: 12528 - RNA, 20 nt, Artificial Sequence
  Synthetic
ccagggaucccgauguuggu

SEQ ID NO: 12529 - RNA, 20 nt, Artificial Sequence
  Synthetic
ccauccaccaacaucgggau

SEQ ID NO: 12530 - RNA, 20 nt, Artificial Sequence
  Synthetic
cccuuuccuaguccagggau

SEQ ID NO: 12531 - RNA, 20 nt, Artificial Sequence
  Synthetic
ccuaguccagggaucccgau

SEQ ID NO: 12532 - RNA, 20 nt, Artificial Sequence
  Synthetic
ccuuuccuaguccagggauc

SEQ ID NO: 12533 - RNA, 20 nt, Artificial Sequence
  Synthetic
cgggaucccuggacuaggaa

SEQ ID NO: 12534 - RNA, 20 nt, Artificial Sequence
  Synthetic
cuaguccagggaucccgaug

SEQ ID NO: 12535 - RNA, 20 nt, Artificial Sequence
  Synthetic
cugagcccuuuccuagucca

SEQ ID NO: 12536 - RNA, 20 nt, Artificial Sequence
  Synthetic
cuuuccuaguccagggaucc

SEQ ID NO: 12537 - RNA, 20 nt, Artificial Sequence
  Synthetic
gagcccuuuccuaguccagg

SEQ ID NO: 12538 - RNA, 20 nt, Artificial Sequence
  Synthetic
gaucccuggacuaggaaagg

SEQ ID NO: 12539 - RNA, 20 nt, Artificial Sequence
  Synthetic
gccauccaccaacaucggga

SEQ ID NO: 12540 - RNA, 20 nt, Artificial Sequence
  Synthetic
gcccuuuccuaguccaggga

SEQ ID NO: 12541 - RNA, 20 nt, Artificial Sequence
  Synthetic
ggaucccgauguugguggau

SEQ ID NO: 12542 - RNA, 20 nt, Artificial Sequence
  Synthetic
ggaucccuggacuaggaaag

SEQ ID NO: 12543 - RNA, 20 nt, Artificial Sequence
  Synthetic
ggccauccaccaacaucggg

SEQ ID NO: 12544 - RNA, 20 nt, Artificial Sequence
  Synthetic
gggaucccgauguuggugga

SEQ ID NO: 12545 - RNA, 20 nt, Artificial Sequence
  Synthetic
gggaucccuggacuaggaaa

SEQ ID NO: 12546 - RNA, 20 nt, Artificial Sequence
  Synthetic
gggccauccaccaacaucgg

SEQ ID NO: 12547 - RNA, 20 nt, Artificial Sequence
  Synthetic
guccagggaucccgauguug

SEQ ID NO: 12548 - RNA, 20 nt, Artificial Sequence
  Synthetic
uaguccagggaucccgaugu

SEQ ID NO: 12549 - RNA, 20 nt, Artificial Sequence
  Synthetic
uccaccaacaucgggauccc

SEQ ID NO: 12550 - RNA, 20 nt, Artificial Sequence
  Synthetic
uccagggaucccgauguugg

SEQ ID NO: 12551 - RNA, 20 nt, Artificial Sequence
  Synthetic
ucccuggacuaggaaagggc

SEQ ID NO: 12552 - RNA, 20 nt, Artificial Sequence
  Synthetic
uccuaguccagggaucccga

SEQ ID NO: 12553 - RNA, 20 nt, Artificial Sequence
  Synthetic
ucgggaucccuggacuagga

SEQ ID NO: 12554 - RNA, 20 nt, Artificial Sequence
  Synthetic
ucugagcccuuuccuagucc

SEQ ID NO: 12555 - RNA, 20 nt, Artificial Sequence
  Synthetic
ugagcccuuuccuaguccag

SEQ ID NO: 12556 - RNA, 20 nt, Artificial Sequence
  Synthetic
uuccuaguccagggaucccg

SEQ ID NO: 12557 - RNA, 20 nt, Artificial Sequence
  Synthetic
uuuccuaguccagggauccc

SEQ ID NO: 12558 - RNA, 21 nt, Artificial Sequence
  Synthetic
aacaucgggaucccuggacua

SEQ ID NO: 12559 - RNA, 21 nt, Artificial Sequence
  Synthetic
acaucgggaucccuggacuag

SEQ ID NO: 12560 - RNA, 21 nt, Artificial Sequence
  Synthetic
accaacaucgggaucccugga

SEQ ID NO: 12561 - RNA, 21 nt, Artificial Sequence
  Synthetic
agcccuuuccuaguccaggga

SEQ ID NO: 12562 - RNA, 21 nt, Artificial Sequence
  Synthetic
agggaucccgauguuggugga

SEQ ID NO: 12563 - RNA, 21 nt, Artificial Sequence
  Synthetic
aguccagggaucccgauguug

SEQ ID NO: 12564 - RNA, 21 nt, Artificial Sequence
  Synthetic
auccaccaacaucgggauccc

SEQ ID NO: 12565 - RNA, 21 nt, Artificial Sequence
  Synthetic
aucccuggacuaggaaagggc

SEQ ID NO: 12566 - RNA, 21 nt, Artificial Sequence
  Synthetic
aucgggaucccuggacuagga

SEQ ID NO: 12567 - RNA, 21 nt, Artificial Sequence
  Synthetic
aucugagcccuuuccuagucc

SEQ ID NO: 12568 - RNA, 21 nt, Artificial Sequence
  Synthetic
caacaucgggaucccuggacu

SEQ ID NO: 12569 - RNA, 21 nt, Artificial Sequence
  Synthetic
caccaacaucgggaucccugg

SEQ ID NO: 12570 - RNA, 21 nt, Artificial Sequence
  Synthetic
cagggaucccgauguuggugg

SEQ ID NO: 12571 - RNA, 21 nt, Artificial Sequence
  Synthetic
cauccaccaacaucgggaucc

SEQ ID NO: 12572 - RNA, 21 nt, Artificial Sequence
  Synthetic
caucgggaucccuggacuagg

SEQ ID NO: 12573 - RNA, 21 nt, Artificial Sequence
  Synthetic
ccaacaucgggaucccuggac

SEQ ID NO: 12574 - RNA, 21 nt, Artificial Sequence
  Synthetic
ccaccaacaucgggaucccug

SEQ ID NO: 12575 - RNA, 21 nt, Artificial Sequence
  Synthetic
ccagggaucccgauguuggug

SEQ ID NO: 12576 - RNA, 21 nt, Artificial Sequence
  Synthetic
ccauccaccaacaucgggauc

SEQ ID NO: 12577 - RNA, 21 nt, Artificial Sequence
  Synthetic
cccuuuccuaguccagggauc

SEQ ID NO: 12578 - RNA, 21 nt, Artificial Sequence
  Synthetic
ccuaguccagggaucccgaug

SEQ ID NO: 12579 - RNA, 21 nt, Artificial Sequence
  Synthetic
ccuuuccuaguccagggaucc

SEQ ID NO: 12580 - RNA, 21 nt, Artificial Sequence
  Synthetic
cgggaucccuggacuaggaaa

SEQ ID NO: 12581 - RNA, 21 nt, Artificial Sequence
  Synthetic
cuaguccagggaucccgaugu

SEQ ID NO: 12582 - RNA, 21 nt, Artificial Sequence
  Synthetic
cugagcccuuuccuaguccag

SEQ ID NO: 12583 - RNA, 21 nt, Artificial Sequence
  Synthetic
cuuuccuaguccagggauccc

SEQ ID NO: 12584 - RNA, 21 nt, Artificial Sequence
  Synthetic
gagcccuuuccuaguccaggg

SEQ ID NO: 12585 - RNA, 21 nt, Artificial Sequence
  Synthetic
gaucccuggacuaggaaaggg

SEQ ID NO: 12586 - RNA, 21 nt, Artificial Sequence
  Synthetic
gccauccaccaacaucgggau

SEQ ID NO: 12587 - RNA, 21 nt, Artificial Sequence
  Synthetic
gcccuuuccuaguccagggau

SEQ ID NO: 12588 - RNA, 21 nt, Artificial Sequence
  Synthetic
ggaucccgauguugguggaug

SEQ ID NO: 12589 - RNA, 21 nt, Artificial Sequence
  Synthetic
ggaucccuggacuaggaaagg

SEQ ID NO: 12590 - RNA, 21 nt, Artificial Sequence
  Synthetic
ggccauccaccaacaucggga

SEQ ID NO: 12591 - RNA, 21 nt, Artificial Sequence
  Synthetic
gggaucccgauguugguggau

SEQ ID NO: 12592 - RNA, 21 nt, Artificial Sequence
  Synthetic
gggaucccuggacuaggaaag

SEQ ID NO: 12593 - RNA, 21 nt, Artificial Sequence
  Synthetic
gggccauccaccaacaucggg

SEQ ID NO: 12594 - RNA, 21 nt, Artificial Sequence
  Synthetic
guccagggaucccgauguugg

SEQ ID NO: 12595 - RNA, 21 nt, Artificial Sequence
  Synthetic
uaguccagggaucccgauguu

SEQ ID NO: 12596 - RNA, 21 nt, Artificial Sequence
  Synthetic
uccaccaacaucgggaucccu

SEQ ID NO: 12597 - RNA, 21 nt, Artificial Sequence
  Synthetic
uccagggaucccgauguuggu

SEQ ID NO: 12598 - RNA, 21 nt, Artificial Sequence
  Synthetic
ucccuggacuaggaaagggcu

SEQ ID NO: 12599 - RNA, 21 nt, Artificial Sequence
  Synthetic
uccuaguccagggaucccgau

SEQ ID NO: 12600 - RNA, 21 nt, Artificial Sequence
  Synthetic
ucgggaucccuggacuaggaa

SEQ ID NO: 12601 - RNA, 21 nt, Artificial Sequence
  Synthetic
ucugagcccuuuccuagucca

SEQ ID NO: 12602 - RNA, 21 nt, Artificial Sequence
  Synthetic
ugagcccuuuccuaguccagg

SEQ ID NO: 12603 - RNA, 21 nt, Artificial Sequence
  Synthetic
ugggccauccaccaacaucgg

SEQ ID NO: 12604 - RNA, 21 nt, Artificial Sequence
  Synthetic
uuccuaguccagggaucccga

SEQ ID NO: 12605 - RNA, 21 nt, Artificial Sequence
  Synthetic
uuuccuaguccagggaucccg

SEQ ID NO: 12606 - RNA, 22 nt, Artificial Sequence
  Synthetic
aacaucgggaucccuggacuag

SEQ ID NO: 12607 - RNA, 22 nt, Artificial Sequence
  Synthetic
acaucgggaucccuggacuagg

SEQ ID NO: 12608 - RNA, 22 nt, Artificial Sequence
  Synthetic
accaacaucgggaucccuggac

SEQ ID NO: 12609 - RNA, 22 nt, Artificial Sequence
  Synthetic
agcccuuuccuaguccagggau

SEQ ID NO: 12610 - RNA, 22 nt, Artificial Sequence
  Synthetic
agggaucccgauguugguggau

SEQ ID NO: 12611 - RNA, 22 nt, Artificial Sequence
  Synthetic
aguccagggaucccgauguugg

SEQ ID NO: 12612 - RNA, 22 nt, Artificial Sequence
  Synthetic
auccaccaacaucgggaucccu

SEQ ID NO: 12613 - RNA, 22 nt, Artificial Sequence
  Synthetic
aucccuggacuaggaaagggcu

SEQ ID NO: 12614 - RNA, 22 nt, Artificial Sequence
  Synthetic
aucgggaucccuggacuaggaa

SEQ ID NO: 12615 - RNA, 22 nt, Artificial Sequence
  Synthetic
aucugagcccuuuccuagucca

SEQ ID NO: 12616 - RNA, 22 nt, Artificial Sequence
  Synthetic
augggccauccaccaacaucgg

SEQ ID NO: 12617 - RNA, 22 nt, Artificial Sequence
  Synthetic
caacaucgggaucccuggacua

SEQ ID NO: 12618 - RNA, 22 nt, Artificial Sequence
  Synthetic
caccaacaucgggaucccugga

SEQ ID NO: 12619 - RNA, 22 nt, Artificial Sequence
  Synthetic
cagggaucccgauguuggugga

SEQ ID NO: 12620 - RNA, 22 nt, Artificial Sequence
  Synthetic
cauccaccaacaucgggauccc

SEQ ID NO: 12621 - RNA, 22 nt, Artificial Sequence
  Synthetic
caucgggaucccuggacuagga

SEQ ID NO: 12622 - RNA, 22 nt, Artificial Sequence
  Synthetic
caucugagcccuuuccuagucc

SEQ ID NO: 12623 - RNA, 22 nt, Artificial Sequence
  Synthetic
ccaacaucgggaucccuggacu

SEQ ID NO: 12624 - RNA, 22 nt, Artificial Sequence
  Synthetic
ccaccaacaucgggaucccugg

SEQ ID NO: 12625 - RNA, 22 nt, Artificial Sequence
  Synthetic
ccagggaucccgauguuggugg

SEQ ID NO: 12626 - RNA, 22 nt, Artificial Sequence
  Synthetic
ccauccaccaacaucgggaucc

SEQ ID NO: 12627 - RNA, 22 nt, Artificial Sequence
  Synthetic
cccuuuccuaguccagggaucc

SEQ ID NO: 12628 - RNA, 22 nt, Artificial Sequence
  Synthetic
ccuaguccagggaucccgaugu

SEQ ID NO: 12629 - RNA, 22 nt, Artificial Sequence
  Synthetic
ccuuuccuaguccagggauccc

SEQ ID NO: 12630 - RNA, 22 nt, Artificial Sequence
  Synthetic
cgggaucccuggacuaggaaag

SEQ ID NO: 12631 - RNA, 22 nt, Artificial Sequence
  Synthetic
cuaguccagggaucccgauguu

SEQ ID NO: 12632 - RNA, 22 nt, Artificial Sequence
  Synthetic
cugagcccuuuccuaguccagg

SEQ ID NO: 12633 - RNA, 22 nt, Artificial Sequence
  Synthetic
cuuuccuaguccagggaucccg

SEQ ID NO: 12634 - RNA, 22 nt, Artificial Sequence
  Synthetic
gagcccuuuccuaguccaggga

SEQ ID NO: 12635 - RNA, 22 nt, Artificial Sequence
  Synthetic
gaucccuggacuaggaaagggc

SEQ ID NO: 12636 - RNA, 22 nt, Artificial Sequence
  Synthetic
gccauccaccaacaucgggauc

SEQ ID NO: 12637 - RNA, 22 nt, Artificial Sequence
  Synthetic
gcccuuuccuaguccagggauc

SEQ ID NO: 12638 - RNA, 22 nt, Artificial Sequence
  Synthetic
ggaucccgauguugguggaugg

SEQ ID NO: 12639 - RNA, 22 nt, Artificial Sequence
  Synthetic
ggaucccuggacuaggaaaggg

SEQ ID NO: 12640 - RNA, 22 nt, Artificial Sequence
  Synthetic
ggccauccaccaacaucgggau

SEQ ID NO: 12641 - RNA, 22 nt, Artificial Sequence
  Synthetic
gggaucccgauguugguggaug

SEQ ID NO: 12642 - RNA, 22 nt, Artificial Sequence
  Synthetic
gggaucccuggacuaggaaagg

SEQ ID NO: 12643 - RNA, 22 nt, Artificial Sequence
  Synthetic
gggccauccaccaacaucggga

SEQ ID NO: 12644 - RNA, 22 nt, Artificial Sequence
  Synthetic
guccagggaucccgauguuggu

SEQ ID NO: 12645 - RNA, 22 nt, Artificial Sequence
  Synthetic
uaguccagggaucccgauguug

SEQ ID NO: 12646 - RNA, 22 nt, Artificial Sequence
  Synthetic
uccaccaacaucgggaucccug

SEQ ID NO: 12647 - RNA, 22 nt, Artificial Sequence
  Synthetic
uccagggaucccgauguuggug

SEQ ID NO: 12648 - RNA, 22 nt, Artificial Sequence
  Synthetic
ucccuggacuaggaaagggcuc

SEQ ID NO: 12649 - RNA, 22 nt, Artificial Sequence
  Synthetic
uccuaguccagggaucccgaug

SEQ ID NO: 12650 - RNA, 22 nt, Artificial Sequence
  Synthetic
ucgggaucccuggacuaggaaa

SEQ ID NO: 12651 - RNA, 22 nt, Artificial Sequence
  Synthetic
ucugagcccuuuccuaguccag

SEQ ID NO: 12652 - RNA, 22 nt, Artificial Sequence
  Synthetic
ugagcccuuuccuaguccaggg

SEQ ID NO: 12653 - RNA, 22 nt, Artificial Sequence
  Synthetic
ugggccauccaccaacaucggg

SEQ ID NO: 12654 - RNA, 22 nt, Artificial Sequence
  Synthetic
uuccuaguccagggaucccgau

SEQ ID NO: 12655 - RNA, 22 nt, Artificial Sequence
  Synthetic
uuuccuaguccagggaucccga

SEQ ID NO: 12656 - RNA, 17 nt, Artificial Sequence
  Synthetic
uuccucaccagccaguc

SEQ ID NO: 12657 - RNA, 17 nt, Artificial Sequence
  Synthetic
auuccucaccagccagu

SEQ ID NO: 12658 - RNA, 17 nt, Artificial Sequence
  Synthetic
cauuccucaccagccag

SEQ ID NO: 12659 - RNA, 17 nt, Artificial Sequence
  Synthetic
acauuccucaccagcca

1. An RNA molecule comprising a guide sequence portion having 17-25 nucleotides comprising the sequence of 20-22 contiguous nucleotides set forth in any one of SEQ ID NOs: 1-12655.

2. The RNA molecule of claim 1, further comprising
a portion having a tracr mate sequence; and/or
a portion having a tracrRNA sequence which binds to a CRISPR nuclease, and/or one or more linker portions.

3. (canceled)

4. (canceled)

5. (canceled)

6. The RNA molecule of claim 1, wherein the RNA molecule is up to 300 nucleotides in length.

7. A composition comprising the RNA molecule of claim 1 and a CRISPR nuclease.

8. The composition of claim 7, further comprising a nucleic acid template for homology-directed repair, alteration, or replacement of at least a portion of a mutant ADA2 allele.

9. The composition of claim 7, further comprising a second RNA molecule comprising a guide sequence portion having 17-25 nucleotides comprising the sequence of 20-22 contiguous nucleotides set forth in any one of SEQ ID NOs: 1-12655, wherein the sequence of the guide sequence portion of the first RNA molecule is different from the sequence of the guide sequence portion of the second RNA molecule.

10. A method for correcting a mutant ADA2 allele in a cell, the method comprising delivering to the cell the composition of claim 7, wherein a complex of the CRISPR nuclease and the RNA molecule affects a double strand break in the mutant ADA2 allele, and/or wherein the CRISPR nuclease and the RNA molecule are delivered to the cells substantially at the same time or at different times.

11. (canceled)

12. (canceled)

13. (canceled)

14. The method of claim 8, wherein the nucleic acid template is delivered to the cells substantially at the same time or at different times as the CRISPR nuclease and RNA molecule or RNA molecules.

15. The method of claim 10, comprising obtaining the cell with a mutant adenosine deaminase 2 (ADA2) allele from a subject with a mutant ADA2 allele and which subject is (a) homozygous for the mutant ADA2 allele, or (b) heterozygous for the mutant ADA2 allele and a second, different mutant ADA allele.

16. The method of claim 15, comprising obtaining the cell from the subject by mobilization and/or by apheresis, or by bone marrow aspiration.

17. (canceled)

18. The method of claim 10, wherein the cell is prestimulated prior to introducing the composition to the cell.

19. The method of claim 15, further comprising culture expanding the cell to obtain cells.

20. The method of claim 19, wherein the cells are cultured with:
(a) one or more of: stem cell factor (SCF), IL-3, and GM-CSF; and/or
(b) at least one cytokine, wherein the at least one cytokine is preferably a recombinant human cytokine.

21. The method of claim 10, wherein delivering the composition comprises electroporation of the cell or cells.

22. A modified cell obtained by the method of claim 10.

23. (canceled)

24. The modified cell of claim 22, wherein the cell, or cells obtained from culture expanding the cell, are capable of:
(a) engraftment;
(b) giving rise to progeny cells;
(c) giving rise to progeny cells after engraftment;
(d) giving rise to progeny cells after an autologous engraftment; and/or
(e) giving rise to progeny cells for at least 12 months or at least 24 months after engraftment.

25. The modified cell of claim 22, wherein the modified cell is a hematopoietic stem cell and/or progenitor cell HSPC;
wherein the modified cell is a CD34+ hematopoietic stem cell; or
wherein the modified cell is a bone marrow cell or peripheral mononucleated cell (PMC).

26. (canceled)

27. A composition comprising the modified cell of claim 22 and a pharmaceutically acceptable carrier.

28. (canceled)

29. A method of treating a subject afflicted with Adenosine deaminase 2 (ADA2) deficiency, comprising administration of a therapeutically effective amount of the modified cells of claim 22.

30. (canceled)

31. (canceled)

32. (canceled)

33. A method of treating, ameliorating, or preventing Adenosine deaminase 2 (ADA2) deficiency, the method comprising delivering to a subject having or at risk of having Adenosine deaminase 2 (ADA2) deficiency the modified cell or cells of claim 24.

34. (canceled)

35. (canceled)

36. (canceled)

37. (canceled)
